(19) United States
(12) Patent Application Publication
(10) Pub. No.: US 2018/0230545 A1
(43) Pub. Date: Aug. 16, 2018

(54) Method for the prediction of progression of bladder cancer

(71) Applicant: Stichting Katholieke Universiteit, Nijmegen (NL)

(72) Inventors: Antoine G. van der Heijden, Nijmegen (NL); Lourdes Mengual Brichs, Barcelona (ES)

(73) Assignee: Stichting Katholieke Universiteit, Nijmegen (NL)

(21) Appl. No.: 15/750,508

(22) PCT Filed: Aug. 4, 2016
(86) PCT No.: PCT/EP2016/068673

§ 371 Date: Feb. 6, 2018

(30) Foreign Application Priority Data
Aug. 6, 2015 (EP) 15180037.2

(51) Int. Cl. C12Q 1/6886

(52) U.S. Cl. CPC C12Q 1/6886; C12Q 2600/158; C12Q 2600/118

(57) ABSTRACT

The invention relates to the field of medicine, specifically the field of diagnosis and treatment of cancer.

### FIELD OF THE INVENTION

[0001] The invention relates to the field of medicine, specifically the field of diagnosis and treatment of cancer.

### BACKGROUND OF THE INVENTION

[0002] Urothelial carcinoma is the most common bladder cancer (BC) with an incidence of approximately 90%. At diagnosis two-third of urothelial carcinomas are non-muscle invasive and one-third are muscle invasive. Non-muscle invasive bladder cancer (NMIBC) is characterized by a high risk of recurrence (30-85% depending on stage and grade) after transurethral resection of the bladder tumor (TURBT). Moreover, up to 17% of all NMIBC will eventually progress to muscle invasive bladder cancer (MIBC). Progression is mainly seen within 48 months after initial diagnosis and depends on stage, grade and presence of concomitant Carcinoma In Situ (CIS) [1]. Progressive patients deserve careful attention, particularly because the treatment and pathogenesis of MIBC and NMIBC differ and conventional histopathological evaluation is adequate for diagnosis but is inadequate to accurately predict the behavior of high risk NMIBC. Thus, there is a clear need for predictive biomarkers that can distinguish progressive from non-progressive NMIBC. Given the heterogeneity of BC it is unlikely that a single marker can identify its progression. This underlines the importance of biomarker combinations.

### SUMMARY OF THE INVENTION

[0003] In an aspect, the invention provides for a method for the prediction of progression of bladder cancer in a subject comprising determination of the expression level of at least one, two, three, four or five bladder cancer marker genes selected from the group consisting of ANXA10, BNC2, BNIP3L, C16orf74, DAB2, FGFR1, FLJ36031, HIST1H2AH, HYAL2, MAP4K1, PFKFB4, PPARD, SERPINB5, SPOCD1 and ZDHHC7 in a sample from a subject, wherein differential expression of at least one, two, three, four or five marker genes is predictive for progression of the bladder cancer.

[0004] In a further aspect, the invention provides for the use of at least one, two, three, four or five bladder cancer marker genes selected from the group consisting of ANXA10, BNC2, BNIP3L, C16orf74, DAB2, FGFR1, FLJ36031, HIST1H2AH, HYAL2, MAP4K1, PFKFB4, PPARD, SERPINB5, SPOCD1 and ZDHHC7 for predicting, preferably in vitro or ex vivo progression of bladder cancer.

[0005] In a further aspect, the invention provides for a method of treatment comprising:
[0006] establishing a prediction of progression of bladder cancer in a subject using a method according to the first aspect of the invention, and,
[0007] treating a subject wherein the bladder cancer is predicted to progress for progressive bladder cancer, or,
   [0008] treating a subject wherein the bladder cancer is predicted not to progress for non-progressive bladder cancer.

[0009] In a further aspect, the invention provides for a composition comprising at least one, two, three, four or five sets of nucleic acid molecules suitable for the determination of the expression level of a bladder cancer marker gene selected from the group consisting of ANXA10, BNC2, BNIP3L, C16orf74, DAB2, FGFR1, FLJ36031, HIST1H2AH, HYAL2, MAP4K1, PFKFB4, PPARD, SERPINB5, SPOCD1 and ZDHHC7.

[0010] In a further aspect, the invention provides for a kit useful for performing a method for the prediction of progression of bladder cancer in a subject comprising determination of the expression level of at least one, two, three, four or five bladder cancer marker genes selected from the group consisting of ANXA10, BNC2, BNIP3L, C16orf74, DAB2, FGFR1, FLJ36031, HIST1H2AH, HYAL2, MAP4K1, PFKFB4, PPARD, SERPINB5, SPOCD1 and ZDHHC7 in a sample from a subject, comprising at least one, two, three, four or five sets of nucleic acid molecules suitable for the determination of the expression level of a bladder cancer marker gene selected from the group consisting of ANXA10, BNC2, BNIP3L, C16orf74, DAB2, FGFR1, FLJ36031, HIST1H2AH, HYAL2, MAP4K1, PFKFB4, PPARD, SERPINB5, SPOCD1 and ZDHHC7.

### DETAILED DESCRIPTION OF THE INVENTION

[0011] As set forward here above, in non-muscle invasive bladder cancer (NMIBC) conventional histopathological evaluation is inadequate to accurately predict progression to muscle invasion. It is therefore an object of the invention to provide a method to predict tumor progression, especially to predict progression to muscle invasion in subjects suffering from T1G3 bladder cancer.

[0012] Surprisingly, it has now been demonstrated that different expression patterns, already at a time point before any clinical evidence, of a new set of genes are predictive for progression and non-progression of T1G3 bladder cancer later on during the disease.

[0013] Accordingly, in a first aspect the invention provides a method for the prediction of progression of bladder cancer in a subject comprising determination of the expression level of at least one, two, three, four or five bladder cancer marker genes selected from the group consisting of ANXA10, BNC2, BNIP3L, C16orf74, DAB2, FGFR1, FLJ36031, HIST1H2AH, HYAL2, MAP4K1, PFKFB4, PPARD, SERPINB5, SPOCD1 and ZDHHC7 in a sample from a subject, wherein differential expression of at least one, two, three, four or five marker genes is predictive for progression of the bladder cancer. Said method is herein further referred to as a method according to the invention. In the embodiments of the invention, reference is made to genes, preferably human genes, such as but not limited to GUSB, PPIA, ANXA10, DAB2, HYAL2, MAP4K1 and SPOCD1, as marker genes for prediction of progression of bladder cancer; these genes are referred to by their assigned names. The person skilled in the art is able to identify and use these genes for the embodiments of the invention based on these assigned names and to determine, using means known in the art, the expression level of the these genes. In addition, the person skilled in the art may use the sequence data provided in the sequence listing and Table 1 of the application. Preferably, in the embodiments of the invention, at least two bladder cancer marker genes selected from the group consisting of ANXA10, BNC2, BNIP3L, C16orf74, DAB2, FGFR1, FLJ36031, HIST1H2AH, HYAL2, MAP4K1, PFKFB4, PPARD, SERPINB5, SPOCD1 and ZDHHC7 are used; more preferably, at least three bladder cancer marker genes selected from the group consisting of ANXA10, BNC2, BNIP3L, C16orf74, DAB2, FGFR1, FLJ36031, HIST1H2AH, HYAL2, MAP4K1, PFKFB4, PPARD, SERPINB5, SPOCD1 and ZDHHC7 are used; even more preferably at least four bladder cancer marker genes selected from the group consisting of ANXA10, BNC2, BNIP3L, C16orf74, DAB2, FGFR1, FLJ36031, HIST1H2AH, HYAL2, MAP4K1, PFKFB4, PPARD, SERPINB5, SPOCD1 and ZDHHC7 are used; more preferably, at least five bladder cancer marker genes selected from the group consisting of ANXA10, BNC2, BNIP3L, C16orf74, DAB2, FGFR1, FLJ36031, HIST1H2AH, HYAL2, MAP4K1, PFKFB4, PPARD, SERPINB5, SPOCD1 and ZDHHC7 are used.

[0014] In the embodiments of the invention, the bladder cancer is preferably a T1G3 bladder cancer.

[0015] In the embodiments of the invention, the expression level of a bladder cancer marker gene, or any other gene, may be determined using any means known to the person skilled in the art, including but not limited to determining the amount of mRNA of a subject gene in a sample and determining the amount of gene product, such a polypeptide, in a sample. The expression level is preferably normalized in view of the expression level of a housekeeping gene, i.e. a gene whose expression is not influenced by the disease or condition of the subject. Of course, it is preferred that the expression level of the subject gene or genes and of the housekeeping gene or genes are determined by identical techniques under identical conditions from the same sample.

[0016] In the embodiments of the invention, the term “sensitivity” is preferably defined as the method's ability to identify positive results; in the context of the invention “sensitivity” is thus an indication for the prediction whether in a subject suffering from bladder cancer the cancer will progress.

[0017] In the embodiments of the invention, the term “specificity” is preferably defined as the method's ability to identify negative results; in the context of the invention “sensitivity” is thus an indication for the prediction whether in a subject suffering from bladder cancer the cancer will not progress.

[0018] In the embodiments of the invention, the term “Positive Predictive Value” (PPV) is defined as the method's ability to identify the proportion of test results that are true positives; in the context of the invention PPV is thus an indication for the proportion of subjects that is correctly predicted as wherein the bladder cancer will actually progress. In the embodiments of the invention, the term “Negative Predictive Value” (NPV) is defined as the method's ability to identify the proportion of test results that are true negatives; in the context of the invention “NPV” is thus an indication for the proportion of subjects that is correctly predicted as wherein the bladder cancer will actually not progress.

[0019] Preferably in a method and other embodiments according to the invention, the differential expression is determined:
[0020] by comparing the expression level of the bladder cancer marker gene in a sample from a subject suffering from bladder cancer to the expression level of the marker gene in a corresponding sample from a subject not suffering from bladder cancer, or,
[0021] by comparing the expression level of the bladder cancer marker gene in a sample from a subject suffering from bladder cancer to an expression level reference value of the bladder cancer marker gene that is indicative for progression of the bladder cancer, or,
[0022] by comparing the expression level of the bladder cancer marker gene in a sample from a subject suffering from bladder cancer to an expression level reference value of the bladder cancer marker gene that is indicative for non-progression of the bladder cancer, or,
[0023] by comparing the expression level of the bladder cancer marker gene in a sample from a subject suffering from bladder cancer to the expression level of the bladder cancer marker gene in a corresponding sample from a subject suffering from bladder cancer that later in time demonstrated progression of the bladder cancer (i.e. a progressive subject), or
[0024] by comparing the expression level of the bladder cancer marker gene in a sample form a subject suffering from bladder cancer to the expression level of the bladder cancer marker gene in a corresponding sample from a subject suffering from bladder cancer that later in time did not demonstrate progression of the bladder cancer (i.e. a non-progressive subject).

[0025] Preferably, in the methods and other embodiments according to the invention, the differential expression is determined by comparing the expression level of the bladder cancer marker gene in a sample from a subject suffering from bladder cancer to an expression level reference value of the bladder cancer marker gene that is indicative for progression of the bladder cancer.

[0026] As is depicted here above, a reference value in the methods and other embodiments according to the invention may be a reference value obtained from a single sample or subject of may be the average, mean or median of several values obtained from multiple samples of a single or multiple subjects.

[0027] The subject expression level of at least one, two, three, four or five bladder cancer marker genes according to the invention in the methods and other embodiments according to the invention may be a value obtained from a single sample of the subject suffering from bladder cancer of may be the average, mean or median of several values obtained from multiple samples of the subject.

[0028] Preferably in the methods and other embodiments according to the invention, the expression level is preferably normalized in view of the expression level of an endogenous control gene such as a housekeeping gene, i.e. a gene whose expression is not influenced by the disease or condition of the subject. Accordingly, in the methods and other embodiments according to the invention, prediction of progression of bladder cancer in a subject comprising determination of the expression level of at least one, two, three, four or five bladder cancer marker genes selected from the group consisting of ANXA10, BNC2, BNIP3L, C16orf74, DAB2, FGFR1, FLJ36031, HIST1H2AH, HYAL2, MAP4K1, PFKFB4, PPARD, SERPINB5, SPOCD1 and ZDHHC7 in a sample from a subject, preferably further comprises determination of the expression level of an endogenous control gene such as a housekeeping gene, preferably selected from the group consisting of GUSB and PPIA.

[0029] Differential expression is herein defined as a statistically relevant difference (preferably p≤0.05) in expression level of a subject gene in a measured sample compared to the expression level of the subject gene measured in another sample, e.g. the expression level of a subject gene in a sample from a subject suffering from bladder cancer compared to the expression level of the subject gene in a sample from a subject not suffering from bladder cancer. Differential expression may be up-regulation (i.e. a higher expression level) or down-regulation (i.e. a lower expression level) and may be depicted as a percentage change or difference, as a fold change or difference, as a log change difference or the like. Preferably, in the methods and other embodiments according to the invention, differential expression of a bladder cancer marker gene is defined as at least 10%, 20%, 30%, 50%, 60%, 70%, 80%, 90%, 100%, 150%, 200%, 300%, 400%, 500%, 600%, 700% or at least 800% up-regulation or down-regulation, compared to the expression level of the corresponding bladder cancer marker gene in a corresponding sample from a non-progressive subject, the expression level of the corresponding bladder cancer marker gene in a corresponding sample from a subject not suffering from bladder cancer, the expression level reference value of the bladder cancer marker gene that is indicative for non-progression of the bladder cancer, or the expression level reference value of the bladder cancer marker gene that is indicative progression of the bladder cancer.

[0030] In the methods and other embodiments of the invention, preferably, the progression of bladder cancer is the progression from non-muscle-invasive bladder cancer to muscle-invasive bladder cancer, more preferably the progression from non-muscle-invasive T1G3 bladder cancer to muscle-invasive T1G3 bladder cancer.

[0031] The person skilled in the art knows how to discriminate between non-muscle-invasive bladder cancer (NMIBC) to muscle-invasive bladder cancer (MIBC) e.g. by conventional histopathological evaluation.

[0032] In the methods and other embodiments of the invention, preferably, the expression level of at least two bladder cancer marker genes selected from the group consisting of ANXA10, BNC2, BNIP3L, C16orf74, DAB2, FGFR1, FLJ36031, HIST1H2AH, HYAL2, MAP4K1, PFKFB4, PPARD, SERPINB5, SPOCD1 and ZDHHC7 is determined wherein one of the at least two bladder cancer marker genes is SPOCD1. More preferably, the expression level of at least SPOCD1 and ANXA10 is determined; the expression level of at least SPOCD1 and DAB2 is determined; the expression level of at least SPOCD1 and HYAL2 is determined; or the expression level of at least SPOCD1 and MAP4K1 is determined. Even more preferably, the expression level of at least SPOCD1, ANXA10 and DAB2 is determined; the expression level of at least SPOCD1, ANXA10 and HYAL2 is determined; the expression level of at least SPOCD1, ANXA10 and MAP4K1 is determined; the expression level of at least SPOCD1, DAB2 and HYAL2 is determined; the expression level of at least SPOCD1, DAB2 and MAP4K1 is determined; or the expression level of at least SPOCD1, HYAL2 and MAP4K1 is determined. Even more preferably, the expression level of DAB2, HYAL2, MAP4K1 and SPOCD1 is determined; the expression level of ANXA10, HYAL2, MAP4K1 and SPOCD1 is determined; the expression level of ANXA10, DAB2, MAP4K1 and SPOCD1 is determined; or the expression level of ANXA10, DAB2, HYAL2 and SPOCD1 is determined. Most preferably, the expression level of at least ANXA10, DAB2, HYAL2, MAP4K1 and SPOCD1 is determined.

[0033] In addition to the determination of the expression levels of the genes and sets of genes depicted here above, in the methods and other embodiments of the invention, the expression level of an additional bladder cancer marker gene may be determined, including but not limited to a gene selected from the group consisting of: ABAT, ABCC5, ABLIM1, ACAD9, ADSS, AP3M1, ATG3, BCAS1, BIRC4, BIRC5, BIRC6, BNC2, BNIP3L, C15orf52, C16orf74, C6orf136, CCDC75, CCDC80, CDC20, CDC25B, CLN3, CSRP2, DICER1, DUOX1, ELF3, ERGIC2, FAM174B, FGF11, FGFR3, FLJ36031, GAB2, GBA2, GGPS1, GHR, GPRC5A, GRB7, HES5, HIST1H2AH, HIST2H4B, ICMT, IGDCC4, IGF2, IL6ST, LRRC16, MBD6, MCM7, MDK, MUTYH, MXRA7, MYL3, NCKAP1, NRG4, ODC1, OPA1, PCOLCE1, PDPK1, PDPN, PFKFB4, PIK3R1, PLAG1, PPARD, PROC, PRRG2, PSD4, PSIP1, RB23, RAB25, RBP1, RBPMS2, RFX1, RNF216, SCN5A, SERPINB5, SORBS1, STAT5B, TAGLN, THRSP, TMEM1219, TPM1, TRAF4, TTC39C, ULK1, WBP1, WHSC1, ZAK, ZDHHC7 and ZNF816A; more preferably a gene selected from the group consisting of: BNC2, BNIP3L, C16orf74, DAB2, FGFR1, FLJ36031, HES5, HIST1H2AH, HIST2H4B, HYAL2, MAP4K1, MUTYH, PFKFB4, PPARD, SERPINB5, WBP1 and ZDHH7.

[0034] In the methods and other embodiments according to the invention, the sample may any relevant sample and may be a direct sample or may be a derived or a processed sample. Preferably, the sample comprises tumor cells, more preferably the sample is a tumor sample, or a bladder fluid sample; preferably the bladder fluid sample is a bladder wash or urine. Samples may be obtained in invasive and non-invasive ways. A preferred non-invasive sample is a bladder fluid, such as a bladder wash or urine.

[0035] In the methods and other embodiments according to the invention determination of the expression level of a bladder cancer marker gene, or any other gene, may be determined using any means known to the person skilled in the art, including but not limited to determining the amount of mRNA of a subject gene in a sample and determining the amount of gene product, such a polypeptide, in a sample. Preferably, the determination of the expression level is performed by a nucleic acid amplification method, preferably by PCR, more preferably by RT-PCR, more preferably multiplex PCR or multiplex RT-PCR. PCR primers in the methods and embodiments according to the invention can readily be designed and produced by the person skilled in the art and/or by a service provider; commercially available primers can be used, such as preferably the primers used in the examples herein and listed in Table 1.

[0036] Preferably, the method according to the invention is an in vitro or ex vivo method. When a sample is obtained in a non-invasive way, the method will inherently be an in vitro method. When a sample is obtained in an invasive way, the method may still be an ex vivo method since the provision of the sample may be excluded from the method according to the invention.

[0037] In a second aspect, the invention provides for the use of at least one, two, three, four or five bladder cancer marker genes selected from the group consisting of ANXA10, BNC2, BNIP3L, C16orf74, DAB2, FGFR1, FLJ36031, HIST1H2AH, HYAL2, MAP4K1, PFKFB4, PPARD, SERPINB5, SPOCD1 and ZDHHC7 for predicting, preferably in vitro or ex vivo progression of bladder cancer. In this aspect of the invention, the features and embodiments of the first aspect of the invention are preferred features and embodiments.

[0038] In a third aspect, the present invention provides for a method of treatment comprising:
[0039] establishing a prediction of progression of bladder cancer in a subject using a method according to the first aspect of the invention, and,
[0040] treating a subject wherein the bladder cancer is predicted to progress for progressive bladder cancer, or,
[0041] treating a subject wherein the bladder cancer is predicted not to progress for non-progressive bladder cancer.

[0042] Said method of treatment is herein referred to as a method of treatment according to the invention. Preferably, in a method of treatment according to the invention, treatment of a subject wherein the bladder cancer is predicted to progress comprises cystectomy, and/or wherein treatment of a subject wherein the bladder cancer is predicted not to progress comprises intravesical therapy such as immune therapy using BCG and/or interferon, or chemotherapy preferably using mitomycin, epirubicin, thiotepa, valrubicin, doxorubicin, and/or gemcitabine, and/or hypothermia.

[0043] This aspect of the invention also provides for the use of at least one, two, three, four or five bladder cancer marker genes selected from the group consisting of ANXA10, BNC2, BNIP3L, C16orf74, DAB2, FGFR1, FLJ36031, HIST1H2AH, HYAL2, MAP4K1, PFKFB4, PPARD, SERPINB5, SPOCD1 and ZDHHC7 for the preparation of a medicament for the treatment of bladder cancer comprising:
[0044] establishing a prediction of progression of bladder cancer in a subject using a method according to the first aspect of the invention, and,
[0045] treating a subject wherein the bladder cancer is predicted to progress for progressive bladder cancer, or,
[0046] treating a subject wherein the bladder cancer is predicted not to progress for non-progressive bladder cancer.

[0047] This aspect of the invention also provides for at least one, two, three, four or five bladder cancer marker genes selected from the group consisting of ANXA10, BNC2, BNIP3L, C16orf74, DAB2, FGFR1, FLJ36031, HIST1H2AH, HYAL2, MAP4K1, PFKFB4, PPARD, SERPINB5, SPOCD1 and ZDHHC7 for use in an in vivo diagnostic method for the prediction of progression of bladder cancer in a subject using a method according to the first aspect of the invention.

In this aspect of the invention, the features and embodiments of the first aspect of the invention are preferred features and embodiments.

[0048] In the methods and other embodiments of the invention, treatment of bladder cancer any be any kind of treatment known to the person skilled in the art, such as e.g. described in Guidelines on Non-muscle-invasive Bladder Cancer (TA, T1 and CIS), Bajuk et al, 2015.

[0049] In a fourth aspect, the invention provides for a composition comprising at least one, two, three, four or five sets of nucleic acid molecules suitable for the determination of the expression level of a bladder cancer marker gene as defined the first aspect of the invention, preferably suitable for determination by a nucleic acid amplification method, preferably by PCR, more preferably by RT-PCR, more preferably multiplex PCR or multiplex RT-PCR.

[0050] In this aspect of the invention, the features and embodiments of the first aspect of the invention are preferred features and embodiments.

[0051] In a fifth aspect, the invention provides for a kit useful for performing the method according to the first aspect of the invention, comprising at least one, two, three, four or five sets of nucleic acid molecules suitable for the determination of the expression level of a bladder cancer marker gene as defined in any of claims 1-10, preferably suitable for determination by a nucleic acid amplification method, preferably by PCR, more preferably by RT-PCR.

[0052] In this aspect of the invention, the features and embodiments of the first aspect of the invention are preferred features and embodiments.

[0053] In this document and in its claims, the verb “to comprise” and its conjugations is used in its non-limiting sense to mean that items following the word are included, but items not specifically mentioned are not excluded. In addition, reference to an element by the indefinite article “a” or “an” does not exclude the possibility that more than one of the element is present, unless the context clearly requires that there be one and only one of the elements. The indefinite article “a” or “an” thus usually means “at least one”. The word “about” or “approximately” when used in association with a numerical value (e.g. about 10) preferably means that the value may be the given value (of 10) more or less 0.1% of the value.

[0054] The sequence information as provided herein should not be so narrowly construed as to require inclusion of erroneously identified bases. The skilled person is capable of identifying such erroneously identified bases and knows how to correct for such errors. In the embodiments of the invention, reference is made to genes, preferably human genes, such as but not limited to GUSB, PPIA, ANXA10, DAB2, HYAL2, MAP4K1 and SPOCD1, as marker genes for prediction of progression of bladder cancer; these genes are referred to by their assigned names. The person skilled in the art is able to identify and use these genes for the embodiments of the invention based on these assigned names and to determine, using means known in the art, the expression level of the these genes. In addition, the person skilled in the art may use the sequence data provided in the sequence listing and in Table 1 of the application. The person skilled in the art is aware that mutations, whether silent or non-silent may be present in the genes, mRNA and polypeptide sequences provided in herein such as in Table 1 and in the sequence listing. The person skilled in the art knows how to determine the expression level of a gene that is slightly different than the one listed herein or in the prior art. Accordingly, where the expression level of a given gene is described herein, it is to be construed as also comprising the expression level of a gene sequence, mRNA or gene product that has at least 80%, 85%, 90%, 91%, 92%, 93%, 94%, 95%, 96%, 97%, 98%, or 99% sequence identity with the given gene sequence.

[0055] All patent and literature references cited in the specification are hereby incorporated by reference in their entirety.

TABLE 1
Sequences

| SEQ | | |
|---|---|---|
| ID | | |
| NO | Gene/Polypeptide | Sequence |
| 1 | ANXA10 gDNA | See sequence listing |
| 2 | ANXA10 mRNA | See sequence listing |
| 3 | ANXA10 protein | See sequence listing |
| 4 | BNC2 gDNA | See sequence listing |
| 5 | BNC2 mRNA | See sequence listing |
| 6 | BNC2 protein | See sequence listing |
| 7 | BNIP3L gDNA | See sequence listing |
| 8 | BNIP3L mRNA | See sequence listing |
| 9 | BNIP3L protein | See sequence listing |
| 10 | C16orf74 gDNA | See sequence listing |
| 11 | C16orf74 mRNA | See sequence listing |
| 12 | C16orf74 protein | See sequence listing |
| 13 | DAB2 gDNA | See sequence listing |
| 14 | DAB2 mRNA | See sequence listing |
| 15 | DAB2 protein | See sequence listing |
| 16 | FGFR1 gDNA | See sequence listing |
| 17 | FGFR1 mRNA | See sequence listing |
| 18 | FGFR1 protein | See sequence listing |
| 19 | FLJ36031 gDNA | See sequence listing |
| 20 | FLJ36031 mRNA | See sequence listing |
| 21 | FLJ36031 protein | See sequence listing |
| 22 | HIST1H2AH gDNA | See sequence listing |
| 23 | HIST1H2AH mRNA | See sequence listing |
| 24 | HIST1H2AH protein | See sequence listing |
| 25 | HYAL2 gDNA | See sequence listing |
| 26 | HYAL2 mRNA | See sequence listing |
| 27 | HYAL2 protein | See sequence listing |
| 28 | MAP4K1 gDNA | See sequence listing |
| 29 | MAP4K1 mRNA | See sequence listing |
| 30 | MAP4K1 protein | See sequence listing |
| 31 | PFKFB4 gDNA | See sequence listing |
| 32 | PFKFB4 mRNA | See sequence listing |
| 33 | PFKFB4 protein | See sequence listing |
| 34 | PPARD gDNA | See sequence listing |
| 35 | PPARD mRNA | See sequence listing |
| 36 | PPARD protein | See sequence listing |
| 37 | SERPINB5 gDNA | See sequence listing |
| 38 | SERPINB5 mRNA | See sequence listing |
| 39 | SERPINB5 protein | See sequence listing |
| 40 | SPOCD1 gDNA | See sequence listing |
| 41 | SPOCD1 mRNA | See sequence listing |
| 42 | SPOCD1 protein | See sequence listing |
| 43 | ZDHHC7 gDNA | See sequence listing |
| 44 | ZDHHC7 mRNA | See sequence listing |
| 45 | ZDHHC7 protein | See sequence listing |
| 46 | GUSB gDNA | See sequence listing |
| 47 | GUSB mRNA | See sequence listing |
| 48 | GUSB protein | See sequence listing |
| 49 | PPIA gDNA | See sequence listing |
| 50 | PPIA mRNA | See sequence listing |
| 51 | PPIA protein | See sequence listing |

| Gene | TaqMan primer probe set from Life Technologies |
|---|---|
| BNC2 | Hs00417700_m1 |
| DAB2 | Hs01120074_m1 |
| FGFR1 | Hs00915142_m1 |
| FLJ36031 | Hs00703139_s1 |
| HIST1H2AH | Hs00544732_s1 |
| HYAL2 | Hs00186841_m1 |
| SPOCD1 | Hs00375905_m1 |
| ZDHHC7 | Hs00938102_m1 |
| SERPINB5 | Hs00985285_m1 |
| BNIP3L | Hs00188949_m1 |
| PPARD | Hs04187066_g1 |
| PFKFB4 | Hs00190096_m1 |
| C16orf74 | Hs00293326_m1 |
| ANXA10 | Hs00200464_m1 |
| MAP4K1 | Hs00179345_m1 |
| PPIA | Hs99999904_m1 |
| GUSB | Hs99999908_m1 |

### FIGURE LEGENDS

[0056] FIG. 1.

[0057] Study Outline.

[0058] Tissue samples were obtained from a total of 40 progressive and 56 non-progressive high risk NMIBC patients. Samples were split in a screening (21 samples) and validation phase (75 samples). Genes differentially expressed between progressive and non-progressive high risk NMIBC patients were identified in the screening phase by using gene expression microarray. Genetic classifiers for NMIBC diagnosis and prediction of tumour aggressiveness were identified, which resulted in a five gene expression signature. None of the samples from the screening set were employed for the validation process. In addition, an internal cross-validation strategy was performed on the proposed signature.

[0059] Abbreviations: prog=progressive; non-prog=non-progressive; AUC=Area Under Curve.

[0060] FIG. 2.

[0061] Differentially expressed genes between progressive and non-progressive high risk NMIBC.

[0062] A. Screen dump of heat map displaying the 50 most differentially expressed genes between progressive and non-progressive samples. B. Screen dump of heat map displaying the 75 genes differentially expressed genes between progressive and non-progressive samples to be further analyzed by RT-qPCR.

[0063] Red pixels correspond to an increased abundance of mRNA in the samples, whereas green pixels indicate decreased mRNA levels. Rows represent genes and columns represent experimental samples.

[0064] FIG. 3.

[0065] ROC analysis based on the predicted probabilities derived from a two, three, four gene model and from the five-gene model (3 a, c, e and g) and LOOCV analysis based on the predicted probabilities derived from a two, three, four gene model from the five-gene model (3 b, d, f and h).

### EXAMPLES

[0066] The invention is further described by the following examples which should not be construed as limiting the scope of the invention.

[0067] Unless stated otherwise, the practice of the invention will employ standard conventional methods of molecular biology, virology, microbiology or biochemistry. Such techniques are described in Sambrook et al. (1989) Molecular Cloning, A Laboratory Manual (2^{nd} edition), Cold Spring Harbor Laboratory, Cold Spring Harbor Laboratory Press; in Sambrook and Russell (2001) Molecular Cloning: A Laboratory Manual, Third Edition, Cold Spring Harbor Laboratory Press, NY; in Volumes 1 and 2 of Ausubel et al. (1994) Current Protocols in Molecular Biology, Current Protocols, USA; and in Volumes I and II of Brown (1998) Molecular Biology LabFax, Second Edition, Academic Press (UK); Oligonucleotide Synthesis (N. Gait editor); Nucleic Acid Hybridization (Hames and Higgins, eds.).

### Example 1. A Five-Gene Expression Signature to Predict Progression in T1G3 Bladder Cancer

### SUMMARY

### Background

[0068] In non-muscle invasive bladder cancer (NMIBC) conventional histopathological evaluation is inadequate to accurately predict progression to muscle invasion.

[0069] Objective:

[0070] To analyze tumour gene expression profiles of progressive and non-progressive T1G3 bladder cancer (BC) patients to develop a gene expression signature to predict tumour progression.

[0071] Design, Setting and Participants:

[0072] Retrospective, multicenter study of 96 T1G3 BC patients who underwent a transurethral resection. Patients with concomitant CIS were excluded. Formalin-fixed paraffin embedded tissue samples were collected.

[0073] Outcome Measurements and Statistical Analysis:

[0074] Global gene expression patterns were analyzed in 21 selected samples from progressive and non-progressive T1G3 BC patients using Illumina microarrays. Expression levels of 94 genes selected based on microarray data and based on literature were studied by quantitative PCR in 75 progressive and non-progressive T1G3 BC patients. Univariate logistic regression was used to identify individual predictors. A variable selection method was used to develop a multiplex biomarker model. Discrimination of the model was measured by ROC curve AUC.

[0075] Results and Limitations:

[0076] Expression levels of 1294 genes differed more than 1.5-fold between progressive and non-progressive patients. Differential expression of fifteen genes was validated by quantitative PCR in an additional set of samples. A five-gene expression signature (ANXA10, DAB2, HYAL2, SPOCD1 and MAP4K1) discriminated progressive and non-progressive T1G3 BC patients with a sensitivity of 79% and a specificity of 86% (AUC=0.83). Limitations are sample size and retrospective design

### INTRODUCTION

[0077] Gene expression analyses have had an important effect on the discovery of new molecular markers for diagnosis and prediction of disease outcome in BC [2-4]. In this work differentially expressed genes between progressive and non-progressive T1G3 BC were studied. Subsequently, the recently introduced approach of Biomark Fluidigm Arrays based on the quantitative PCR, allowed validation of identified differentially expressed genes in a larger series. A five-gene signature was identified to predict progression in T1G3 BC patients.

### Materials and Methods

### Patients and Samples

[0078] A retrospective multicenter study in which a total of 96 patients (mean age 69 yr, range 39-90 yr; 24 females, 72 males) with T1G3 urothelial carcinoma of the bladder who underwent TURBT in two different centers (Hospital Clinic, Barcelona, Spain and Radboud University Medical Center, Nijmegen, The Netherlands) between 1993 and 2010 were included. Patients with concomitant CIS were excluded. Two groups of patients were formed; non-progressive patients consisting of recurrent non-progressive patients with at least two years of follow up with one or more non-muscle invasive recurrences (N=56) and progressive patients consisting of individuals with a period of at least more than six months between the initial TURBT showing T1G3 BC and the progression to MIBC (N=40). Cytology and urethrocystoscopy three months after the initial TURBT had to be negative; otherwise these patients were qualified as having residual and not progressive disease. The median time to progression was 11 months (range 6 to 81 months). Demographic and clinicopathological characteristics of enrolled patients are shown in Table 3 [5,6]. Tissue samples were obtained under institutional review board-approved protocol.

### Tissue Specimens and RNA Isolation

[0079] Upon obtainment the tissue was fixed in 10% formalin within 24 h and subsequently embedded in paraffin. A slide of each specimen was stained with haematoxylin-eosin to determine the presence of tumour. The tumour area was macro-dissected from slides (total thickness 80-μm) and total RNA was isolated using the RecoverAll Total Nucleic Acid Isolation Kit for FFPE (Ambion, Inc. Austin, Tex., USA) according to the manufacturer's protocol. Total RNA was quantified by spectrophotometric analysis at 260 nm (NanoDrop Technologies, Wilmington, Del., USA).

### Whole Genome Gene Expression Microarray: Global Screening Phase

[0080] A flowchart of the entire study is shown in FIG. 1. Global mRNA profiling of 21 selected T1G3 BC cases from Hospital Clinic, Barcelona, Spain (12 progressive and 9 non-progressive), was performed using Whole-Genome Gene Expression DASL HT Assay (Illumina, San Diego, Calif., USA), according to manufacturer's instructions [7]. All 21 selected samples had cycle quantification (Cq) values for RPL13A<28, which is considered to be of acceptable RNA quality by the microarray manufacturer's (data not shown).

[0081] Data analysis: DASL gene expression data was processed employing quantile normalization using the Lumi bioconductor package. Next, a conservative probe-filtering step excluding those probes with a coefficient of variation of lower than 0.1 was conducted, which resulted in the selection of a total of 22,032 probes (corresponding to 16,653 genes) from the original set of 29,377. For the detection of differentially expressed probes, a linear model was fitted to the data and empirical Bayes moderated statistics were calculated using the Limma package from Bioconductor [8]. Genes representing a change of 1.5-fold or greater and moderated p-value <0.05 were considered as differentially expressed.

### Quantitative PCR Using BioMark 96.96 Dynamic Arrays: Classifier Discovery Phase

[0082] Validation of Microarray Expression Data by qPCR in an Additional Set of Samples:

[0083] Differential expression of 94 genes was validated in an additional set of 75 tissue samples from two university medical centres (Table 3) using BioMark 96.96 Dynamic Arrays (Fluidigm, South San Francisco, Calif., USA). Seventy-five of 94 genes were selected from microarray expression experiments (p<0.05). Additionally, 19 genes recently described in progressive NMIBC were selected from literature [9-11].

cDNA Synthesis and Pre-Amplification:

[0084] cDNA was synthesized from 100 ng of total RNA, using the High Capacity cDNA reverse transcription kit (Applied Biosystems, Foster City, Calif. USA; hereafter referred to as AB) following manufacturer's instructions, except that the final volume of the reaction was 25 μl. Each cDNA sample was used for the multiplex preamplification of the target cDNAs using TaqMan PreAmp Master Mix kit following manufacturer's instructions (AB), except that the final reaction volume of the reaction was 5 μl. A total of 94 target genes and the two endogenous controls (GUSB and PPIA) were used in the pre-amplification reaction.

### Quantitative PCR Using BioMark 96.96 Dynamic Arrays:

[0085] cDNA and TaqMan® Gene Expression Assays 20× (AB) were loaded into the Dynamic Array following the manufactures instructions. The real-time quantitative PCR (qPCR) experiments were performed on the BioMark instrument. Primers for cDNA synthesis and PCR were commercially available primers from Life Technologies, see Table 1.

### Quantitative PCR Data Analysis:

[0086] The real-time qPCR analysis software was used to obtain cycle quantification (Cq) values. Threshold was manually calculated for each gene. Relative expression levels of target genes within a sample were expressed as ΔCq (ΔCq=Cqendogenous control−Cqtarget gene). The mean Cq value of GUSB and PPIA were used as endogenous control. Genes with Cq values above 35 were considered as lowly expressed, and their ΔCq were imputed to minimum ΔCq value for that gene. Fold change values were generated from the median expression of the genes from the BioMark 96.96 Dynamic Arrays in the groups compared. Differences in gene expression levels between progressive and non-progressive patients were explored using the Student's t test. Significance was defined as p<0.05. R-software was used for all calculations and to construct the heat map.

### Statistical Analysis:

[0087] The association of each variable with NMIBC progression status was analyzed by univariate logistic regression. Significance was defined as p values <0.05. Significant transcripts were subjected to a variable selection using elastic net [12] in order to identify the smallest number of transcripts to separate both groups. Since all the samples were used for the model generation, the performance of the model may be over-optimized. To correct this bias, we further performed a leave-one-out cross-validation (LOOCV).

[0088] The optimal probability cut-off for the univariate study variables and logistic regression model was computed through a ROC analysis. R-software was used for all calculations. Gene-gene interaction networks for the genes of the model were built by the GeneMANIA Cytoscape 3.0.0 plugin [30]. Physical, co-expression, and pathway gene-gene interactions were evaluated.

### Results

### Global Gene Expression Profile Analysis

[0089] The analysis of gene expression profile of 12 progressive and 9 non-progressive T1G3 BC patients by Illumina microarray's resulted in the identification of 1343 transcripts differentially expressed between both groups; 620 down-regulated and 723 up-regulated transcripts in progressive compared with non-progressive cases. Heat map based on the 50 most differentially expressed genes shows a clear distinction between the progressive and the non-progressive groups (FIG. 2).

### Prediction of NMIBC Progression in an Additional Validation Set

[0090] To test whether the expression profile of the 94 selected genes (Table 2) can be used to predict progression in T1G3 BC, we additionally analyzed expression of these genes in 28 progressive and 47 non-progressive patients from two hospitals (Table 3) by using BioMark 96.96 Dynamic Arrays.

[0091] The relative gene expression values (ΔCq) for the 94 markers in progressive and non-progressive samples were analyzed by univariate analysis to see whether it is possible to separate both groups (Table 2). Fifteen genes were differentially expressed between progressive and non-progressive T1G3 BC samples (Table 4). Univariate analysis shows the performance of each individual biomarker as predictors of NMIBC progression (Table 5).

### Classifier Discovery Phase

[0092] To evaluate if a multiplex model could improve performance over single biomarkers, these 15 genes were subjected to a variable selection to identify the minimum combination to accurately predict NMIBC progression. This analysis resulted in a final selection of a five-gene model that contains ANXA10, DAB2, HYAL2, SPOCD1 and MAP4K1. This model is capable of discriminative prediction of progressive from non-progressive T1G3 BC cases with an overall SN of 79% and a SP of 86% (PPV=90%; NPP=71%; ER=19%; AUC=0.83) (FIG. 3). After applying the LOOCV analysis to this five-gene model, SN was 74% for discriminating between both groups of patients with a SP of 79% (PPV=85%; NPP=65%; ER=24%; AUC 0.751) (FIGS. 3 g and h). A gene model comprising SPOCD1 and at least one gene selected from ANXA10, DAB2, HYAL2 and MAP4K1 is, although with somewhat lower SN and SP values also capable to discriminative prediction of progressive from non-progressive T1G3 BC cases (FIGS. 3 a-f).

### ROC; DAB2+SPOCD1: SN of 61.70% and a SP of 60.71% (PPV=72.5%; NPV=48.57%; ER=38.66%; AUC=0.742);

### LOOCV; DAB2+SPOCD1: SN of 61.70% and a SP of 60.72% (PPV=72.5%; NPV=48.57%; ER=38.67%; AUC=0.695); ROC; DAB2+HYAL2+SPOCD1: SN of 72.34% and a SP of 71.42% (PPV=80.95%; NPV=60.61%; ER=28%; AUC=0.798);

### LOOCV; DAB2+HYAL2+SPOCD1: SN of 68.09% and a SP of 67.86% (PPV=78.05%; NPV=55.88%; ER=32%; AUC=0.742); ROC; DAB2+HYAL2+SPOCD1+MAP4K1: SN of 78.72% and a SP of 78.57% (PPV=86.05%; NPV=68.75%; ER=21.33%; AUC=0.827);

### LOOCV; DAB2+HYAL2+SPOCD1+MAP4K1: SN of 68.05% and a SP of 71.43% (PPV=80%; NPV=57.14%; ER=30.67%; AUC=0.748).

[0093] The generated network by GeneMANIA shows that there are no direct interactions between the five genes of the model (data not shown).

### DISCUSSION

[0094] Prediction of disease outcome for patients diagnosed with high risk NMIBC is an important clinical challenge. Histopathological and clinical tumour characterization is unable to accurately predict whether high risk NMIBC will progress to MIBC. Since treatment regimens change when patients are likely to progress to MIBC, there is a critical need for objective methods to identify those patients. In this study a gene expression signature to distinguish progression in T1G3 BC was identified. For disease progression the expression of a single gene is rarely an indicator since this is regulated by many different mechanisms. Therefore, in the discovery phase an accurate 5-gene signature (ANXA10, DAB2, HYAL2, SPOCD1 and MAP4K1) to predict progression in T1G3 BC was composed. Although LOOCV indicates a certain degree of overfitting, all data obtained after cross validation corroborate the SN and SP for the final model. ANXA10, DAB2, HYAL2 and MAP4K1 had been previously associated with BC, but to the best of our knowledge, this is the first study that relates alterations in expression of SPOCD1 (SpenParalog and OrthologsC-terminal domain-containing 1) with BC. It should be noted that no direct interactions between the five genes were found (data not shown).

[0095] SPOCD1 encodes a protein that belongs to the TFIIS family of transcription factors and the 8-fold down-regulation that was observed may lead to a different transcription profile.

[0096] ANXA10 (Annexin A10) is a calcium and phospholipid-binding protein that participates in cell differentiation and tissue growth. ANXA10 was 3-fold down-regulated in progressive T1G3 BC patients. This is in concordance with previous data in which ANXA10 down-regulation correlated with increased invasion, proliferation and metastasis in colorectal, gastric and lung cancer cell lines [13-15]. Dyrskjot et al. studied the ANXA10 gene expression in BC. In 150 patients a gene expression signature with among others ANXA10 was able to predict the presence of CIS, and progression to MIBC [3]. Subsequently, Munksgaard et al. focused on low ANXA10 mRNA expression and showed that this was associated with the presence of concomitant CIS and a shorter progression free survival. Furthermore, they found in two BC cell lines that ANXA10 down-regulation induced an increase of proliferation and migration [16].

[0097] DAB2, disabled 2, mitogen-responsive phosphoprotein, plays a pivotal role in cellular homeostasis. It modulates protein trafficking, cytoskeleton organization, cell adhesion and migration, and cell signaling of various receptor tyrosine kinases. Results about DAB2 expression levels in cancer appear to be conflicting as up-regulation as well as down-regulation of DAB2 has been reported. A systematic review showed that DAB2 was down-regulated in 70 to 90% of human cancers, including breast cancer and nasopharyngeal carcinomas [17], whereas other studies showed a weak to moderate positive DAB2 immunostaining in lung and esophageal cancer [18,19]. For BC moderate expression of DAB2 was observed in 60% of the transitional cell lines used [20], but Karam et al showed that DAB2 expression decreased in comparison to normal bladder and that decreased DAB2 expression was more prominent in advanced (Ta, Tis and T1 versus T2-4) BC [21].

[0098] In our study DAB2 was 3-fold up-regulated in progressive NMIBC patients compared to non-progressive NMIBC patients. Clearly, our patient population differs as we specifically studied pT1G3 BC tumours and excluded patients with concomitant CIS, which may explain this seeming inconsistency.

[0099] HYAL2, Hyaluronidase 2, degrades hyaluronan into smaller fragments endowed with specific biological activities such as inflammation and angiogenesis. The exact role in tumour promotion or suppression is not clear yet, but HYAL2 plays a role in tumour cell adhesion and migration. Previously, elevated hyaluronidase levels were described in urine of bladder and prostate cancer patients and therefore it was considered a biomarker for these cancers [21,23]. In progressive T1G3 BC patients HYAL2 was 3-fold up-regulated. This is in concordance with recently published data on colorectal cancer, in which HYAL2 was overexpressed, especially in advanced stages [24]. Furthermore, of HYAL2 overexpression correlated with deeper invasiveness of breast cancer cell lines [25].

[0100] MAP4K1 is a mitogen-activated protein 4 kinase 1 also known as HPK1 (Hematopoietic Progenitor Kinase 1), which regulates cell cycle, cell adhesion, migration and apoptosis. MAP4K1 is activated by a range of environmental stimuli, including genotoxic stress, growth factors, inflammatory cytokines and antigen receptor triggering. MAP4K1 was 1.5-fold up-regulated in our cohort of progressive patients. Wang and co-workers showed in BC cell lines (T24 and 5637) also an up-regulated expression of MAP4K1 [26]. MAP4K1 can be activated after being phosphorylated by tyrosine kinase and in turn may activate the Raf→MEK1→MAPK/ERK pathway to modulate the cell cycle, cell adhesion, migration and apoptosis [27]. Although the expression of MAP4K1 is up-regulated in BC, the process of its phosphorylation may be inhibited, thus blocking the MAPK/ERK pathway [26].

[0101] In a comprehensive, integrated study of 131 MIBC four expression subtypes were distinguished [28]. Type 1 MIBC was enriched with papillary features supporting the idea that these MIBC correspond to the papillary NMIBC that have shown progression. Whether our gene signature of progressive T1G3 BC is comparable to type 1 MIBC deserves further study.

[0102] Given the genomic heterogeneity of BC, one limitation of this study is its sample size. Furthermore, our analysis may have underestimated the genetic variation present within individual tumours as we sampled only one segment of the tumour. In addition, although studies in two independent cohorts of patients showed comparable results, a final validation in an independent larger series is needed for clinical implementation. Another limitation is the retrospective non-randomized character of this study. However, prospective recruitment of patients is very difficult because the percentage of progressive T1G3 BC is low and the follow up needs to be relatively long to observe progression; in our patient population the longest time interval to progress to MIBC was 81 months.

[0103] An important benefit of this study is the fact that the methodology used is widely available and thus this 5-gene model should be easily implemented in clinical practice. Quantitative PCR is reasonably simple to perform and is inexpensive. Identification of new genes associated with a high probability of tumour progression in combination with a robust, easy-to-use and reliable algorithm may contribute to tailor treatment and surveillance strategies in these patients.

### CONCLUSIONS

[0104] This study describes a 5-gene expression signature that is capable to identify high risk NMIBC patients that progress to MIBC. The utilization of this prognostic technique next to the available clinical and histopathological data will enable a more personalized therapy. Patients with a high risk of progression can be treated more radically. By means of logistic regression we have demonstrated that two or more of these five genes not only complement each other but show synergy. Thus, evidence is provided of an independent added value.

### Tables

TABLE 2
Univariate analysis of predictors for tumour progression in T1G3
BC patients.

| GENE | | | | |
|---|---|---|---|---|
| YMBOL | OR | 95% | CI | p |
| ABAT | 0.91 | 1.35 | 0.62 | 0.6417 |
| ABCC5 | 1.29 | 1.95 | 0.86 | 0.2211 |
| ABLIM1 | 1.59 | 2.56 | 0.99 | 0.0553 |
| ACAD9 | 1.01 | 1.57 | 0.65 | 0.9563 |
| ADSS | 1.33 | 2.06 | 0.85 | 0.2084 |
| ANXA10 | 1.61 | 2.22 | 1.17 | 0.0037* |
| AP3M1 | 1.40 | 2.19 | 0.89 | 0.1442 |
| ATG3 | 0.99 | 2.05 | 0.48 | 0.9834 |
| BCAS1 | 1.41 | 2.04 | 0.97 | 0.0750 |
| BIRC4^{§} | 1.15 | 1.94 | 0.68 | 0.5928 |
| BIRC5^{§} | 1.11 | 1.87 | 0.66 | 0.6946 |
| BIRC6^{§} | 1.21 | 1.98 | 0.74 | 0.4367 |
| BNC2 | 0.53 | 0.88 | 0.32 | 0.0134* |
| BNIP3L^{§} | 1.54 | 2.28 | 1.04 | 0.0330* |
| C15orf52 | 1.16 | 1.92 | 0.70 | 0.5752 |
| C16orf56 | 0.84 | 1.25 | 0.56 | 0.3855 |
| C16orf74^{§} | 1.70 | 2.74 | 1.05 | 0.0294* |
| C6orf136 | 1.17 | 1.72 | 0.79 | 0.4408 |
| CCDC75 | 1.09 | 1.96 | 0.61 | 0.7772 |
| CCDC80 | 0.78 | 1.06 | 0.58 | 0.1096 |
| CDC20^{§} | 0.77 | 1.39 | 0.43 | 0.3844 |
| CDC25B | 0.61 | 1.01 | 0.37 | 0.0552 |
| CLN3 | 1.02 | 1.99 | 0.52 | 0.9558 |
| CSRP2^{§} | 0.91 | 1.17 | 0.71 | 0.4668 |
| DAB2 | 0.40 | 0.74 | 0.22 | 0.0031* |
| DICER1 | 1.37 | 2.29 | 0.82 | 0.2316 |
| DUOX1 | 1.13 | 2.01 | 0.63 | 0.6913 |
| ELF3 | 1.27 | 1.73 | 0.93 | 0.1289 |
| ERGIC2 | 0.86 | 1.24 | 0.59 | 0.4069 |
| FAM174B | 1.36 | 2.27 | 0.81 | 0.2447 |
| FGF11 | 1.17 | 1.80 | 0.76 | 0.4745 |
| FGFR1 | 0.60 | 0.93 | 0.39 | 0.0231* |
| FGFR3^{§} | 1.43 | 2.26 | 0.91 | 0.1189 |
| FLJ36031 | 0.55 | 0.89 | 0.33 | 0.0163* |
| GAB2 | 0.67 | 1.05 | 0.43 | 0.0794 |
| GBA2 | 1.53 | 2.64 | 0.89 | 0.1268 |
| GGPS1 | 1.16 | 1.80 | 0.75 | 0.4963 |
| GHR | 0.70 | 1.07 | 0.46 | 0.1018 |
| GPRC5A | 1.31 | 2.03 | 0.84 | 0.2363 |
| GRB7^{§} | 1.27 | 1.93 | 0.83 | 0.2660 |
| HES5 | 0.64 | 0.96 | 0.43 | 0.0329* |
| HIST1H2AH | 0.46 | 0.94 | 0.23 | 0.0333* |
| HIST2H4B^{§} | 0.65 | 0.99 | 0.43 | 0.0425* |
| HYAL2 | 0.40 | 0.78 | 0.20 | 0.0070* |
| ICMT | 0.69 | 1.15 | 0.41 | 0.1538 |
| IGDCC4 | 0.71 | 1.06 | 0.47 | 0.0912 |
| IGF2^{§} | 0.75 | 1.26 | 0.45 | 0.2809 |
| IL6ST | 0.77 | 1.21 | 0.50 | 0.2589 |
| LRRC16 | 1.23 | 2.04 | 0.74 | 0.4352 |
| MAP4K1^{§} | 0.44 | 0.75 | 0.25 | 0.0030* |
| MBD6 | 0.93 | 1.50 | 0.57 | 0.7616 |
| MCM7^{§} | 0.96 | 1.86 | 0.50 | 0.9020 |
| MDK | 0.69 | 1.19 | 0.40 | 0.1786 |
| MUTYH | 0.60 | 0.96 | 0.37 | 0.0347* |
| MXRA7 | 0.68 | 1.19 | 0.39 | 0.1808 |
| MYL3 | 0.71 | 1.43 | 0.35 | 0.3385 |
| NCKAP1^{§} | 1.07 | 1.97 | 0.58 | 0.8385 |
| NRG4 | 1.57 | 2.67 | 0.92 | 0.0953 |
| ODC1 | 0.84 | 1.51 | 0.47 | 0.5638 |
| OPA1 | 1.04 | 1.72 | 0.63 | 0.8639 |
| PCOLCE2 | 0.80 | 1.08 | 0.60 | 0.1492 |
| PDPK1 | 0.56 | 1.07 | 0.30 | 0.0799 |
| PDPN | 1.06 | 1.54 | 0.73 | 0.7554 |
| PFKFB4^{§} | 1.66 | 2.67 | 1.03 | 0.0386* |
| PIK3R1 | 1.02 | 1.69 | 0.61 | 0.9488 |
| PLAG1 | 1.29 | 2.53 | 0.65 | 0.4644 |
| PPARD^{§} | 1.70 | 2.78 | 1.04 | 0.0332* |
| PROC | 0.86 | 1.55 | 0.48 | 0.6201 |
| PRRG2 | 1.29 | 2.45 | 0.68 | 0.4274 |
| PSD4 | 1.12 | 1.82 | 0.69 | 0.6376 |
| PSIP1 | 1.26 | 1.95 | 0.81 | 0.2991 |
| RAB23 | 0.69 | 1.13 | 0.42 | 0.1426 |
| RAB25 | 1.54 | 2.38 | 0.99 | 0.0543 |
| RBP1 | 0.62 | 1.00 | 0.39 | 0.0520 |
| RBPMS2 | 0.66 | 1.05 | 0.41 | 0.0794 |
| RFX1 | 1.71 | 3.03 | 0.97 | 0.0637 |
| RNF216 | 1.22 | 1.80 | 0.82 | 0.3281 |
| SCN5A | 1.16 | 1.70 | 0.79 | 0.4522 |
| SERPINB5^{§} | 1.65 | 2.40 | 1.14 | 0.0083* |
| SORBS1 | 0.98 | 1.38 | 0.69 | 0.8988 |
| SPOCD1 | 1.85 | 2.81 | 1.21 | 0.0043* |
| STAT5B | 0.56 | 1.03 | 0.31 | 0.0615 |
| TAGLN | 0.79 | 1.07 | 0.58 | 0.1257 |
| THRSP | 1.31 | 2.08 | 0.82 | 0.2605 |
| TMEM219 | 1.26 | 1.83 | 0.86 | 0.2344 |
| TPM1 | 1.39 | 2.07 | 0.94 | 0.1002 |
| TRAF4^{§} | 1.35 | 2.19 | 0.83 | 0.2245 |
| TTC39C | 1.15 | 2.06 | 0.64 | 0.6420 |
| ULK1 | 1.50 | 2.39 | 0.95 | 0.0851 |
| WBP1 | 0.80 | 1.00 | 0.64 | 0.0482* |
| WHSC1^{§} | 1.36 | 2.43 | 0.77 | 0.2924 |
| ZAK | 0.94 | 1.55 | 0.57 | 0.8173 |
| ZDHHC7 | 2.85 | 7.19 | 1.13 | 0.0261* |
| ZNF816A | 1.18 | 1.89 | 0.73 | 0.4952 |

*p <0.05
^{§}Gene selected from literature

TABLE 3
Demographic and clinical characteristics of enrolled patients

| | | Discovery | Discovery |
|---|---|---|---|
| | Screening phase | phase | phase |
| | Hospital Clinic | Hospital Clinic | Radboud UMC |
| | Barcelona | Barcelona | Nijmegen |
| Progressive patients | | | |
| Male | 11 | 8 | 12 |
| Female | 1 | 4 | 4 |
| Mean age | 74 (54-86) | 74 (57-90) | 66 (41-83) |
| Subtotals | 12 | 12 | 16 |
| Non-progressive | | | |
| patients | | | |
| Male | 8 | 18 | 15 |
| Female | 1 | 8 | 6 |
| Mean age | 67 (40-83) | 72 (47-85) | 61(39-77) |
| Subtotals | 9 | 26 | 21 |
| Totals | 21 | 38 | 37 |

TABLE 4
Comparison of microarray and qPCR results for the 15 genes found
differentially expressed in qPCR

| GENE | Microarrays | | qPCR | |
|---|---|---|---|---|
| SYMBOL | FOLD CHANGE | p | FOLD CHANGE | p |
| ANXA10 | −3.09 | 0.041* | −3.42 | 0.002* |
| BNC2 | 2.38 | 0.004* | 2.37 | 0.006* |
| BNIP3L^{§} | −1.27 | 0.600 | −1.79 | 0.037* |
| C16orf74^{§} | 1.07 | 0.868 | −1.63 | 0.028* |
| DAB2 | 2.85 | 0.003* | 1.79 | 0.001* |
| FGFR1 | 12.07 | 0.001* | 1.62 | 0.019* |
| FLJ36031 | 2.16 | 0.002* | 1.70 | 0.012* |
| HIST1H2AH | 2.78 | 0.006* | 1.32 | 0.035* |
| HYAL2 | 2.65 | 0.003* | 1.80 | 0.006* |
| MAP4K1^{§} | 1.44 | 0.164 | 2.05 | 0.003* |
| PFKFB4^{§} | 1.39 | 0.337 | −1.66 | 0.026* |
| PPARD^{§} | −1.07 | 0.784 | −1.62 | 0.026* |
| SERPINB5^{§} | −2.18 | 0.084 | −2.28 | 0.007* |
| SPOCD1 | −8.00 | 0.000* | −2.25 | 0.003* |
| ZDHHC7 | −2.40 | 0.004* | −1.27 | 0.017* |

*p <0.05;
^{§}Gene selected from literature
Fold change values were generated from the mean expression of the mRNAs in the groups compared.

TABLE 3
(5). Univariate analysis of the individual biomarkers
as predictors of NMIBC progression

| GENE | | | | speci- | sensi- | | |
|---|---|---|---|---|---|---|---|
| SYMBOL | OR | p-value | AUC | ficity | tivity | NPV | PPV |
| ANXA10 | 1.61 | 0.004 | 0.76 | 0.72 | 0.77 | 0.64 | 0.83 |
| BNC2 | 0.53 | 0.013 | 0.73 | 0.75 | 0.61 | 0.56 | 0.79 |
| BNIP3L | 1.54 | 0.033 | 0.66 | 0.75 | 0.55 | 0.50 | 0.79 |
| C16orf74 | 1.70 | 0.029 | 0.70 | 0.79 | 0.62 | 0.56 | 0.82 |
| DAB2 | 0.40 | 0.003 | 0.74 | 0.71 | 0.74 | 0.63 | 0.81 |
| FGFR1 | 0.60 | 0.023 | 0.64 | 0.65 | 0.53 | 0.44 | 0.74 |
| FLJ36031 | 0.55 | 0.016 | 0.69 | 0.68 | 0.67 | 0.58 | 0.76 |
| HIST1H2AH | 0.46 | 0.033 | 0.66 | 0.67 | 0.65 | 0.53 | 0.77 |
| HYAL2 | 0.40 | 0.007 | 0.75 | 0.77 | 0.72 | 0.61 | 0.85 |
| MAP4K1 | 0.44 | 0.003 | 0.75 | 0.78 | 0.61 | 0.55 | 0.82 |
| PFKFB4 | 1.66 | 0.039 | 0.64 | 0.59 | 0.68 | 0.53 | 0.73 |
| PPARD | 1.70 | 0.033 | 0.64 | 0.57 | 0.70 | 0.53 | 0.73 |
| SERPINB5 | 1.65 | 0.008 | 0.71 | 0.78 | 0.66 | 0.57 | 0.84 |
| SPOCD1 | 1.85 | 0.004 | 0.73 | 0.63 | 0.72 | 0.57 | 0.77 |
| ZDHHC7 | 2.85 | 0.026 | 0.64 | 0.71 | 0.57 | 0.50 | 0.77 |

### REFERENCE LIST

[0106] 1. Sylvester R J, van der Meij den AP, Oosterlinck W, et al. Predicting recurrence and progression in individual patients with stage Ta T1 bladder cancer using EORTC risk tables: a combined analysis of 2596 patients from seven EORTC trials. Eur Urol 2006; 49:466-5.
[0107] 2. Modlich O, Prisack H B, Pitschke G, et al. Identifying superficial, muscle-invasive, and metastasizing transitional cell carcinoma of the bladder: use of cDNA array analysis of gene expression profiles. Clin Cancer Res 2004; 10:3410-21.
[0108] 3. Dyrskjot L, Zieger K, Real F X, et al. Gene expression signatures predict outcome in non-muscle-invasive bladder carcinoma: a multicenter validation study. Clin Cancer Res 2007; 13:3545-51.
[0109] 4. Mengual L, Burset M, Ars E, et al. DNA microarray expression profiling of bladder cancer allows identification of noninvasive diagnostic markers. J Urol 2009; 182:741-8.
[0110] 5. Lopez-Beltran, A., Sauter, G., Gasser, T. et al.: Tumours of the Urinary System. In: Pathology and Genetics of Tumours of the Urinary System and Male Genital Organs. World Health Organization Classification of Tumours. Lyon: IARC Press; 2004. p. 89.
[0111] 6. Sobin, L. H., Gospodariwicz, M., and Wittekind, C. H.: TNM Classification of Malignant Tumours. UICC International Union Against Cancer. New York: Wiley-Blackwell; 2009. p. 243-248.
[0112] 7. Fan J B, Gunderson K L, Bibikova M, et al. Illumina universal bead arrays. Methods Enzymol 2006; 410:57-73.
[0113] 8. Smyth G K. Limma: linear models for microarray data. In: Bioinformatics and Computational Biology Solutions using R and Bioconductor. Springer; 2005. p. 397-420.
[0114] 9. Dyrskjot L, Zieger K, Kruhøffer M, et al. A molecular signature in superficial bladder carcinoma predicts clinical outcome. Clin Cancer Res 2005; 11:4029-36.
[0115] 10. Yun S J, Jo S W, Ha Y S, et al. PFKFB4 as a prognostic marker in non-muscle-invasive bladder cancer. Urol Oncol 2012; 30:893-9.
[0116] 11. Kim W T, Yun S J, Park C, et al. Identification of C16orf74 as a marker of progression in primary non-muscle invasive bladder cancer. PLoS One 2010; 5:e15260.
[0117] 12. Zou, H. and Hastie, T.: Regularization and variable selection via the elastic net. Journal of the Royal Statistical Society: Series B (Statistical Methodology) 2005; 67:199.
[0118] 13. Patsos G, Germann A, Gebert J, Dihlmann S. Restoration of absent in melanoma 2(AIM2) induces G2/M cell cycle arrest and promotes invasion of colorectal cancer cells. Int J Cancer 2010; 126:1838-49.
[0119] 14. Kim J, Kim M A, Jee C D, Jung E J, Kim W H. Reduced expression and homozygous deletion of annexin A10 in gastric carcinoma. Int J Cancer 2009; 125:1842-50.
[0120] 15. Matsubara D, Niki T, Ishikawa S, et al. Differential expression of S100A2 and S100A4 in lung adenocarcinomas: clinicopathological significance, relationship to p53 and identification of their target genes. Cancer Sci 2005; 96:844-57.
[0121] 16. Munksgaard P P, Mansilla F, Brems Eskildsen A S, et al. Low ANXA10 expression is associated with disease aggressiveness in bladder cancer. Br J Cancer 2011; 105:1379-87.
[0122] 17. Zhang Z, Chen Y, Tang J, Xie X. Frequent loss expression of dab2 and promotor hypermethylation in human cancers: a meta-analysis and systematic review. Pak J Med Sci 2014; 30:432-7.
[0123] 18. Xu H T, Yang L H, Li Q C, et al. Disabled-2 and Axin are concurrently colocalized and underexpressed in lung cancers. Hum Pathol 2011; 42:1491-8.
[0124] 19. Anupam K, Tusharkant C, Gupta S D, Ranju R. Loss of disabled-2 expression is an early event in esophageal squamous tumorigenesis. World J Gastroenterol 2006; 12:6041-5.
[0125] 20. Zhou J, Hernandez G, Tu S W, et al. Synergistic induction of DOC-2/DAB2 gene expression in transitional cell carcinoma in the presence of GATA6 and histone deacetylase inhibitor. Cancer Res 2005; 65:6089-96.
[0126] 21. Karam J A, Shariat S F, Huang H Y, et al. Decreased DOC-2/DAB2 expression in urothelial carcinoma of the bladder. Clin Cancer Res 2007; 13:4400-6.
[0127] 22. Lokeshwar V B, Lokeshwar B L, Pham H T, Block N L. Association of elevated levels of hyaluronidase, a matrix-degrading enzyme, with prostate cancer progression. Cancer Res 1996; 56:651-7.
[0128] 23. Konety B R, Getzenberg R H. Urine based markers of urological malignancy. J Urol 2001; 165:600-11.
[0129] 24. Bouga H, Tsouros I, Bounias D, et al. Involvement of hyaluronidases in colorectal cancer. BMC Cancer 2010; 10:499.
[0130] 25. Udabage L, Brownlee G R, Nilsson S K, Brown T J. The over-expression of HAS2, Hyal-2 and CD44 is implicated in the invasiveness of breast cancer. Exp Cell Res 2005; 310:205-17.
[0131] 26. Wang Y, Luo H, Li Y, Chen T, Wu S, Yang L. hsa-miR-96 up-regulates MAP4K1 and IRS1 and may function as a promising diagnostic marker in human bladder urothelial carcinomas. Mol Med Rep 2012; 5:260-5.
[0132] 27. Oehrl W, Kardinal C, Ruf S, et al. The germinal center kinase (GCK)-related protein kinases HPK1 and KHS are candidates for highly selective signal transducers of Crk family adapter proteins. Oncogene 1998; 17:1893-901.
[0133] 28. Cancer Genome Atlas Research Network. Comprehensive molecular characterization of urothelial bladder carcinoma. Nature 2014; 507:315-22.
[0134] 29. M. Babjuk (Chair), A. Bohle, M. Burger, E. Compérat, E. Kaasinen, J. Palou, M. Rouprêt, B. W. G. van Rhijn, S. Shariat, R. Sylvester, and R. Zigeuner. Guidelines on Non-muscle-invasive Bladder Cancer (TA, T1 and CIS), Bajuk et al, European Association of Urology 2015.
[0135] 30. Montojo J, Zuberi K, Rodriguez H, Bader G D, and Morris Q. GeneMANIA: fast gene network construction and function prediction for cytoscape. F1000Res 2014; 3:153.

1.-15. (canceled)

16. A method for the prediction of progression of bladder cancer in a subject comprising determination of the expression level of at least one, two, three, four or five bladder cancer marker genes selected from the group consisting of ANXA10, BNC2, BNIP3L, C16orf74, DAB2, FGFR1, FLJ36031, HIST1H2AH, HYAL2, MAP4K1, PFKFB4, PPARD, SERPINB5, SPOCD1 and ZDHHC7, in a sample from a subject, wherein differential expression of at least one, two, three, four or five marker genes is predictive for progression of the bladder cancer.

17. A method according to claim 16, wherein differential expression is determined:
by comparing the expression level of the bladder cancer marker gene in a sample from a subject suffering from bladder cancer to the expression level of the marker gene in a corresponding sample from a subject not suffering from bladder cancer, or,
by comparing the expression level of the bladder cancer marker gene in a sample from a subject suffering from bladder cancer to an expression level reference value of the bladder cancer marker gene that is indicative for progression of the bladder cancer, or,
by comparing the expression level of the bladder cancer marker gene in a sample from a subject suffering from bladder cancer to an expression level reference value of the bladder cancer marker gene that is indicative for non-progression of the bladder cancer, or,
by comparing the expression level of the bladder cancer marker gene in a sample from a subject suffering from bladder cancer to the expression level of the bladder cancer marker gene in a corresponding sample from a subject suffering from bladder cancer that later in time demonstrated progression of the bladder cancer (i.e. a progressive subject), or
by comparing the expression level of the bladder cancer marker gene in a sample form a subject suffering from bladder cancer to the expression level of the bladder cancer marker gene in a corresponding sample from a subject suffering from bladder cancer that later in time did not demonstrate progression of the bladder cancer (i.e. a non-progressive subject).

18. A method according to claim 16, further comprising determination of the expression level of an endogenous control gene.

19. A method according to claim 16, wherein the endogenous control gene is selected from the group consisting of GUSB and PPIA.

20. A method according to claim 16, wherein differential expression of a bladder cancer marker gene is defined as at least 10%, 20%, 30%, 50%, 60%, 70%, 80%, 90%, 100%, 150%, 200%, 300%, 400%, 500%, 600%, 700% or at least 800% up-regulation or down-regulation, compared to the expression level of the corresponding bladder cancer marker gene in a corresponding sample from a non-progressive subject, the expression level of the corresponding bladder cancer marker gene in a corresponding sample from a subject not suffering from bladder cancer, the expression level reference value of the bladder cancer marker gene that is indicative for non-progression of the bladder cancer, or the expression level reference value of the bladder cancer marker gene that is indicative progression of the bladder cancer.

21. A method according to claim 16, wherein the progression of bladder cancer is the progression from non-muscle-invasive bladder cancer to muscle-invasive bladder cancer.

22. A method according to claim 16, wherein the expression level of at least two bladder cancer marker genes selected from the group consisting of ANXA10, BNC2, BNIP3L, C16orf74, DAB2, FGFR1, F1136031, HIST1H2AH, HYAL2, MAP4K1, PFKFB4, PPARD, SERPINB5, SPOCD1 and ZDHHC7 is determined wherein one of the at least two bladder cancer marker genes is SPOCD1.

23. A method according to claim 22, wherein the expression level of at least ANXA10, DAB2, HYAL2, MAP4K1 and SPOCD1 is determined.

24. A method according to claim 16, wherein the sample is a tumor sample.

25. A method according to claim 16, wherein the determination of the expression level is performed by a nucleic acid amplification method.

26. A method according to claim 25, wherein the nucleic acid amplification method is multiplex PCR.

27. A method according to claim 16, wherein the method is an in vitro or ex vivo method.

28. A method according to claim 16, wherein the sample is a bladder fluid sample.

29. A method according to claim 28, wherein the bladder fluid sample is urine.

30. A method of treatment comprising:
establishing a prediction of progression of bladder cancer in a subject using a method according to claim 16, and,
treating a subject wherein the bladder cancer is predicted to progress for progressive bladder cancer, or,
treating a subject wherein the bladder cancer is predicted not to progress for non-progressive bladder cancer.

31. A method of treatment according to claim 30, wherein treatment of a subject wherein the bladder cancer is predicted to progress, comprises cystectomy, or wherein treatment of a subject wherein the bladder cancer is predicted not to progress comprises intravesical therapy such as immune therapy using BCG, interferon, chemotherapy or hypothermia.

32. A method of treatment according to claim 31, wherein the chemotherapy uses mitomycin, thiotepa, valrubicin, doxorubicin or gemcitabine.

33. A kit for performing the method according to claim 16, comprising at least one, two, three, four or five sets of nucleic acid molecules suitable for the determination of the expression level of a bladder cancer marker gene as defined in claim 16.

34. A kit according to claim 33, wherein the at least one, two, three, four or five sets of nucleic acid molecules suitable for the determination of the expression level of a bladder cancer marker gene as defined in of claim 16 are suitable for a nucleic acid amplification technique.

35. A kit according to claim 33, comprising a composition comprising at least one, two, three, four or five sets of nucleic acid molecules suitable for the determination of the expression level of a bladder cancer marker gene as defined in claim 16 by a nucleic acid amplification technique.

The application's sequence listing, which the Patent Office published only in electronic form, follows.

SEQUENCE LISTING (51 sequences)

SEQ ID NO: 1 - DNA, 95217 bp, Homo sapiens
agtcatgctgtatccagatttgcttttacattttcttgcctgagtctgaggtgaacagtgaacatatttacatttgatttaacagtgaaccttaattctttctggcttcacagtgaaacaagtttatgcaatcgatcaaatattttcatccctgaggttaacaattaccatcaaaatgttttgtggagactatgtgagtataatgcttatttctgtaaagcttttcactcttttgaaacttgatttataaaatttcatttgtgttttttgacgtttttaacagaaaatgttgttctaatttgtttttattcttactactttcttactattttatgcccattttttgaaagaaacatttatagaatatttaaattttatttctgggattattaaacattactatgataacaagatttttttaatgcaattatttgctatgcttctgaagcaaataaagaaaactgaagattaaagatttggatttgagcatacctaagaatccatttaattagtgggtcttcaatataactattaaacagagttaatattatgaaatcttaaatccatgctaattttgaaacaacgtattatcccacagaggcaagttactttcatatgtaatttgattcagaattctaactgaagttatcataagattttttatctcgatatttacttctatctataaaaaattaaaataattttgactattaattttattttaaatccatgctttctgtaaaagatagcttatttttgaataattttctgttgaatagaagcaatgtataacaagatttagtcttttttttggccttgtctgaatcattttagtccaactgctctaatagtcattcactttttaaaaagccaacatgaacattaagttgtctgaatatgctttatatgaaaaggtctccatttcacatggtcttgaaaattatatacaaatgtgaatttatgccttgtggtcttagaaattatatacaagtatatgtgtgttaatgatgattctttacaaatctatactataaaaaaactttcaggagactgaggcaagagaatggcgtgaacccgggaggcggagcttgcagtgagccgagatcgcgccactgcactccagcctgggcgacagagcgagactccatctcaaaaaacaaaaaacaactttctgggaacttttatgcaaaaaaattataacataattattttgttaaactttggcacacaaaacattgtttactcatacaaagtaatcaatgcaggaaaattttacttatatattgtgtttcttaagataaatactgaattaggacttaaaaggcagctattttccatcactgttagtttaacaatcttaatttcatcttaagatttcaagatctcattttgcagttgaaagttaccattattgttttattaattgtaaggtggttatatttcactacagagaaaaaaaggtatcaagtaattaggccagcatggtaaatgattaaatttgcaaatgcctattgttttctctctctgttcatttgagtatagttatttgggagtaattactattatattctatgcattgtgtggtctaatgttactatttatatgcccatttttcaaaagaaacatattttatagaatatttaaattatatttctgggattattaaacattaccaggctaacaagattttttttaaatgcaattatttgctatgcttctgaagcaaataaagaaaactgaagattaaagatttggatttgagcatacctaagaatccattttaagtacttttgattagctattttagagatgaatgttatgttttatgtataatctcagcaagcctggatggtaaaatggttttacataatcaatatcagtatagtttaaagtaattttctatcttaaggtatatgaccccagtggtcagaatttagtgctaaaaaggccaatatttgaggccaagcttatctctttaatcggatgttctcaagcaagagactggctcttctgttgacaagtaatttcttattttataatgtgggtagtaattgactgagttgtttgttaaagatatgtccctagatcctccttatttagcagtcctgatgcagtatatataacatctgaacttatacacttgatataaaagggttaccatttttgagaaccacagagataggtagttcattactctcaaagtatagaaaatttaaatatacttcaagcaagagacaagaatcatggaaaaatggttacatttctgtaggagataaacatacataatatgttaaaattattttctatatttctggagttaggcgggccccagtgattaaggtagtttaagtgtgcttgttacattaagaaggaaatttatctttggtgcactagtgtattttacttatgtgcttgactgtaagaccatctttcaaaagcaaggtttaattaagagattattgcaagcctgagttttgatatattagtcagatataaatcacatcataggaagatattattataatattataatagctctcttagaatggaggaaattttactatacagtgtacttgcccaagtcaggatctaaacccaggtatctctacatccctagagctcaaattctttttattaatatataatgtctctttagaatacacctgcctctttagaatacaattttcttgtaaaaattgttcgctgattttgtcctgttttgtcatcagctgatcccccttgttcatacagtagcatcttatttactatagattcatttcttagatgatacccttccttttgacctctaataggattagagttaactttaatcctattcccttttctacccttttgacaccttttcctacttctataatatttattgactgacagaaaatgttaatcatagcagtatgaaaagtaggatacatgttgatatcatatttcttacctaaaatagcattatgtattatacaaacatatagaaattattataataatttactgtctatatacatcatccataccttgtttaatttaatcttcacagcaaattgtcctataagaataccatttaacatgcaaaggtttgaagttcttttggaggtactagatattctacccaaatgttttatacatattatttttgtgtttgcaaacttctaggacagtattatcatcccctttttccagatgaaaatactaaggttcagaaaaattaaatacttttcccaggagttaaaagccagtaggtgacagatacagaggattctgtgtaactccaaaatcatttctaccacactgagagaaaaaaatgcctaggtatgattattttttgtgaccccaattaaatgagaaaaacttagcagcggtatctttacaaagatgctttgactcatgagtttgcctcagaatagctcaagagcacgaaagtcaggcaacagcatgttaggcagtgtctactatgggcaatgagacatacagcattttagcctaactagaataaaaataaatgcattggtttttagcagtggattacatgtagtgaaggaaaagcactccataaatcagaaatgaattcagggcatattacctaggagtgattgcagactgacaagacatctcatgggaggagaggctgttgataaggcaagattattttcaagactgtcttttcctatagaaagtaattcccaggacaaaaacttccatccaagaaatctgactttgattgtttatctgcagtatgacttactgagcaaatattattaaaaggttattcatacttcagattgcttttcactatcacaagactacattgtctgaactttacacactttgattcaacaaaagttttgaatcatgctgttatggcttcaacttttactgaaacttctgtagaactaataagagttggattggaaaaattaaatttaactttttccttgaactggcatgcatgcttgttgtaaatttttaaaaatataccattataacaaccatagattggttttaatctaggggctgggcaaacatcactgtagcgtagtggctaaagatacacttaaatctagcctttctgcataggatccatgtgactgagcactacttgctgaatctttctgcacctcaattttttttaacctgttaagtgtgataacagcacctatcttataagggtctcttgagaattgtttggcatataaagcaccaagaagagtatctggagcatagaagcatcccaaaaagatgagctattattcacagtaccagtgccaaagcttgaatccgactctgtctaattcaaaagccctggccttcagctgcccaatgcactgcttctagaggggaggttaagtttgtatccattactaatacaaatgcatatatatatatatatatgtatgtatatgtatatacaatacatacataagcatatatgtatgtgtatatatacaacagtcccaaattttataaagaaatttgagaaacaacaaaagtttcacaaggggaaatatattttctgttgtacttagcataatgtttatttataagtagattgtatcatgcaaaaaaatttcataaacccacttacttcaatttctggtaacttctcttctttattatggtaaaactcctcaaacttgtattacacccattatatacatttcttctccttcaattctctccgtatccattcattaggtttctttctcaaatgccctgcctgaactgctcttattaaagtaaacaatgaccttcatatggttaaatcccatgcctaattctctcctctcatcttgctagacatatgggtgttattagacacaatcgcctttgccagaagtattccagggccaaattcttgaaactcttctccttcctccttatagcctctcctttggtcataagatccaacataatggttttaattacattctatatacagactcttttctgaatttatgtctcaacccagaacctatgcatgaaccccagattcctgtaaccaagtgtctactcattgagtagaaactcatcctcttattagtacagaaaaaggaaagttaaaaaaaaattaagccttgctattatccttggctcaggttctctcataccttacattatcattgcctgccaacttctgcagtggcttcctacctggtgtccctggtcccacctccaggtactggtcagagagtaataaatatcattgtcataaaccctgacctcttgaaacatgtatttcattgacatataagattcatactcactctgcaattacacaaagtaatggaataggaggtaaaagtcagcaaagaggatattttgagaaagccatcttggtttgaaagttcttaatttataatagctagaaaaataagaagacttcaatttgtagaatcacttgcatttttccaagtgagaagttagaacacctctctagatatgttggtttctcttgaatggactagtttttgagattattataaaattatctgttattttgacattatgcttataccattaacattaatacagtgtgcccatttaaataagtattactttaaatctaaggcactcttgaaatttaaaaaaaaaaaagatgtttaactatatgttcttttttttatttttcctaattaatcaacttatttaacaaacagtaaaggaagaaagtcattagattatcacaaatggcaagcactaagaacgtacttctttccttaacccttaaggtgaagtcttcagaaattatgtttaagcaatatgaatcatagttagtttaatgagtcatttattcctgcaattaggtggagaggaaaagcagaaagaaaggagtcatttaaaggtcattatttaccaacttttcatttttcagtatagcctcacacacacccacatccgacccttatctaccttagagttcttctatcagtagaaattatttgtaatcagaagtagctcagcctgattcatcaaaaaggaagggattgcaataatttttaaaaggagatttcagagtttatgctgtcaatctcccagcatcagcttcttctaaatagtctccagctatttgtaatactttactcatagcttttggacatgcatttgttatcaaaggcagagtaaaacttgcttcctggggcctatttttccttgccagcatcacagtcttacaccacacagttatgaatatattcttcctcagttatacttttatttatgtcctctagacattctgggtaattatgctggaaggaaccagaaaaaaaaaaagactattacaagtatcatgtacaaaacataaaagtaaatccacacaagataatgtgttttatataccctgttatagatacagtgggaatcaacttcactcacagcaactttggattggcttttcatctttatttggtggcaatttgtaataataaagcaacagaatgtcttcatgtattttatcattctatctcttaattgaaacatttctgctattttatttttaaataagccagaatggaaggcattgtagtaatactttttcagttatgtaaaaagaaagcactttaaccacagcagatatagcattcttagtactgtgaattagtaatcgttttaaaatatgtaaatcatattgtattttattggtgggttattcttttgttgttgcccttagtacagtagtaaacttcttgaattattgttcaaccctttggagatattgaataaatgtacatattcttctaggcattcatttagttgccagtctgaaaatattgtttgaaaaggtaagtaagaaaacggtcaaagatgccgaaagagagaggcgtcagtacctggggacacatgcaccttctgtgtacctttcctcacctgtgggctgactgctgtgtgtttaatcaagagggcaactcacatatagaaaagtaaatattcacagtgaatacagtagtcccttcacagtagaaaagggttagattcatgaaccctcagtgaaaggtaattaattagtggttttgaaataagactttttcatgtaacaatggttacaactgaacctaatacaacttaacgaccagaagaaactcttcgagatctcactcccttctggttcttattttgtttcattctagatattgtgaatactagaatgactgtgggcggctatgcttggttttccttcaagatattcaatgacttctaatttcatgacttagtggacttggtcttttttttaaatatatgatccatatgtctctgagtgctacagagacagaaatggtttttataaaatgttattttagtcatttggcagagggaaatcagtatcaaataatacctcctctcagaatcactgggttacatataaactgtctgccaacaataacagagaaacaagtgagttagtccctttcaaatattaggcttctttctctctcctacaacatgcaagagttcagctttataatctaggttcatttcctttttgttctttctcaatgctttttgcatattgagaaagttttcaaacaaaaattcatgtaatctagaatcagttgtagaaatttttaagataggtgcactaaactcagaaaactagtcaaatggtgtattgtaattaaaggcatcagattaacttttcttacatttagtcatgtttttaatctagattttttaagtctgatttagagagacatgtagacaggttgaattttcaaaaatacttagctttattggcaatgtagcttattcttctctcatctgattttgatttacaagaacattctttccttagagtgggatataaaacagattcatcatgaaattgtacttccctgtaaggctttctgtcacctcactatgacaatgtgtgaggcaggacatttccatatggttaagatgattgtcacccatctttctattcacaaactttttccctccttaagcctctcatacaggttccttcatctttagctctaagttctctgcttctctctcttgtatggggtgctcttcaaagtgaagacaaaaacaactgggatctgtttcctgctacaactcattattattctcatgtttgaacctctatcttaattcgcagttgtaattcttgtgaaattattttgtcaaactatacggtttgaagctaaattcaaaccaatgtggcaatttctgatttaaaagtttgccatatttagttttatgagactagatatgcacctaaaaatactatgtttaaactttttgttttgggaacatttcagatttacaagaaaaagttgtcaaaataattcataatttgaattacccttcccccagctttccctaatgtttacattttatataaccatattgaaattatcaaaacaggatattaaaataagcacagtgcaactaactaaaccacagatattgtttagattataccagtatttctgctaatcctttggtttcctgcttgatatggtttggatctgtgtccccaccaaatctcatgtagaactgtaattcccggtattgaaggtggggcctggtgggaggtgattggatagtgggggctgtttctcatgaatggtttagtactattcccttggtgctgttctcatgagagtgagttcttgcaagatctggttgcttaaaagtgtgtagcacctcccacttggctctctcattttccttcactggctgtatgatgtgctggctgcccctttgccctcctccatgattgtaagtttcctgaggcctcccaagaagctgagcccatgccaggatcatgcttcctgttcctgtggaactgtgggtcaattagacctcttttctttataaattacccagcctcagatatttctttatagcaatgtgagaatgaactaatacactgctcccaggagctagtggccattgggaacacttttaggcttaatcttacttttgacatttctttcttttctcttttctttgtgttttttttgggggggaaggggacggggggaagcttttccttacttacagctacaagatgcattaatctaatcttgtattttttcttattccagccctagaattaaccacttctccaaaacgccctgattccttccattgaagaccgatatttaaaaccaagatctggatactagttatactcattgctactggggtatcactgtttatatgccctcttaagagtacagagcaaaaaatatgtgtgtatactaacccatttatctgcacacatctatatttacttttgtacatgtgtatgcatatatgtttgcatgtatgcatgtctccatctaccttcctacttatcgatttctctgtctctatccatacatctatctaccatctatcttcatactaatacctccaatctaatcaacaacaccgttctaaccttcaccattatttgttacttctttctcagacagtgaaaactaagactatcaatatctgaaacctgtttgcttatttgtttaaccctaccatacatgtagtttaaaacttgctaagccattactctgtgagaaacaactttaccaagaggagtacattgtttggattatttttatttttagctttacagttcagtcaaaacactattttctaaagttacttagggcacatcccctctctccactgagcttattgtggttatgagatttatttgttatataaatagataaatttgctacaaactgcattttctgttgggttttccatacatctttgttgattttgttaaacttacatttaacaaaatgtgctttttgtggtatacaattttatgatttaagtcatgtatccaatgccacatttccttatagaagacttccattatccaaaaattccaccacactgcctgcctgtagtcagctaccgaccccaaactccaaactctggcaaatattgcactgtttgctgctgctatagtttcaccttctccagaatgtcatgggaacagagtcataaactattgaaccttttggacatggcttcctccgcttagtagaaacatttaaccctaattcatattgtattaatcattagttctgccattttattgctgagtcactgtctcttgtatggatgtaccacaatttgtttatctgttcacagtttgaatggataaactgtgaatggatgaactgtgggttgtttcaggatttagtgattataaataaagctgctctaaacatatcaagttaaagtttttgagtgcagttatgtttccatttcttttgcgtaaacacttagaagcaagattgctaggtcatatggtaacagtacgtttagctttagaaaaaactggcaaactgttttcccaaagtgactatacaattttgcattctcaccagcaatatattacagtagaatatcattgtagttttactttgaatttctttatgggtaatgatattgatcatatcttcatgtgctcatttactataccgtcattgtgaatgtgtttgtttaaaatacttccctatttttatatcattttctttgtttatttatattgtcctatacatattctggattaaacgttttatgaaaatgtaacttacacacctttcctttctttctgtggattgtcttttcagtcctttaacagtgcttttcaccaagcaaaagttttcagttttgacaaagtctaatttattttttcattatggatcatatttttgttgtcatttctaaaaattctttcacttacccaagtcatgtagattttttcttatatttttcttctagaagttttatagacttacatttctattaaggtctatgacaaattttgaatcaatttttgtataaggcatgaagtataggtcaagcttatttttttatatgaatctccaatttttatagtaccatttcttgggaaaactgttttttctctatcaaattgttttcactactttgtcaaaagttacttgtctgcatttatgtgagtctagattctttattctgtccaatcgagctatacttcaatattgttacctaatagcagagtttcattagtactacgacttaataataataattcttaaaatcagttagcattactcctacaattttggagtttcttttcaaaattgtttcagctattctaggtattctgcatttccacaaatatttttgaataaaattgtcaacatcgacacaaaattctgccaggatttcgactgggattttgttgaaaatgtaggccaatttaaggagacttggcatcttaacaatattaagttttctagccatgaaaatggtacatatctttatttatttatctttttaaataactgtcagaagtattctgtttcttctattccaatatgtataatgcttatttcttttaattttcttattgcattgcctaagatttttcggtatggtattgaagtaatggaaaataacattcttgctttcttcctagtctagagcagactggggcgctggaaagggaggtgaagcattcaatatttcacctttaattttagatgtagggtttttgtagatgtcttttaccaaattaatgaagttgctttgtcttttaaatttgcttagtttttaacatgaatagatgctatacttgtcaagtgttttttctgcatcatgttttgatggccatataagttttatttcttaaattgttaataaggtgaattaaacagattgatttttgaatgttgtgccagtcctgcattattgggataaacacaactaagttgtactacatcctcctttttatatattagtacattgaattttcttgtattatgttgggcatatttgcatttatgttcataagggttactatcctacaattttcttttcttgtaatgttgatttggttttggtattagtataatctagattcataaaatgagtcagaaagtgttctcttctattttctagaaaaaaatttggtagaattgatattatttcttccttaaatggttggcagaaatatccagtaaaaccatgtaagctggagattttcttgctgaaaggtttctaaatacaaattcaattttctcaatagatatgaggcaatttaagttaactgcttttcttgaatgagtttgggtaattttagtctgtcaagaaatttaaattgaatatatatgggcattgaatcattcatagcattccttttggtaggaatgttgtcatctatttttatgtttatagtttgtatcttagtttttctttgtaaattggctacagttctatcaatttcattgttgtccaaataataactttacttcattttatttatttttctctttttaattttattgattttactcttgtctttattacctcctacctcctgcttgcattgcatgtaaatttctattatttctctaatttcttgtggtgaaaacttaaattttatttcgttctaatatatttatatttaatgttataaatttacctttaggcactgaaacatatgagtattaaaagtggcagacttgtgtgataaatgtagatgagtgaatttgtttcttctcttgttttgatcagcaaaggtccatgtggtcttgaaagcttttgggatctgtagatttgggcacttttttttttaacttttattttgagttcaggagtacatgtgcaggtttgttatacaggtaaactcgtgtcatgggagttcattgtacagattactttgtgactcaggtattaagcctattacccctgagttatttttcctgactctctccattctcccacccacctccctccagtatgccccagtttctgttgttcccttctatatgtccatgtgttctcattatttagctcccacttataaatgagaacatgtgatatttgtttttctcttcctgtggtagtttgctaagcataatggcctccagctccatccatgtttctgcaaagcacacaatttcattcttctttatggctgtgtagtattccatgttgtatatgtgccacattttctttatccagtctaccattgataagcatttagattgattccatgtctttgctattgtgaatagtgctatagtgaacataaacatgcatttgtctttatggtaaaatggtttatattcctttgggtatatacccagtagtgagattgctgggtcaaataatagttctgttttcagctccttcaggaatcaccacattgttttccacaatggttgaactaatttacactcccaccaacagtatataagcattcctttttctctataagctcaacagcatttgttattttttgactttttattaacagccattctgattggtgtgagatgatatcttattgtggttttcatttgcatttgtctaataatcagtgataagctttttttcatatgcttcttagccacatatatgtcttctttttaaaagtatctgttcatgtcctttgcccactttttggagtgtttcacacatactccaaacatggagttgtttgttttttctttgtagatatgtttaagttgcttataaatgctggatgtttgacctttgtcagctgcatagtttgcaaaagtttctcccattctgtaggttgtttactatgttgacagcttcttttgttgtaatttattagatcccatttgtcaatttttgcctttgttgcaattgttgttggtatctttgtcatgaaatctttgtccattcctattacttgggtacttttcaatgcaaacaattttaggtcaacaataagtataaacaattttggctcaatgatattttaaaaacatttattatgaatttctatagtataatgtgtgggaaatggataaaatgtggattgtggacctgtaaaaatcttaaagttttaattttacaactcaattaagctaggcatttctaattttatatcagtgtgattcttgaaaacaatatagtgttccatggaactcttggaagaaaaaccaaaacctgtgtgatattccagacaggtgctaaagaagagaaatagaatgaatgataattactattaattgaaatacatatctcattaatcttcatagtaactgaaacttgcaaaacgtctacaacttttactttacaaggtgtgaagtaggggagttaaaataatttaccactttgtacagcaaggaacaaagatgatttaaaatcaagtctgctttactgccttactttagtgagatatctatgtctgttatcacaagggaaatggaaaggaggttgtaacattttctggctgtgctttattttttacaatgtccagagaaagtaattatcagatgttttctggttacatgatacatgatttttgctccagtttgtcacttacttgatagatgtatgcttctttttatgcccttctcttcccaatcagaaaaaagaaagttaaatcatataggataaaatgcattacatataaaagttcctgatatttttagatgtgtttcccatgagatgcctcaaagatggaggcatttaaattagtggcaaaaagtatggagggcctcatggagttcttaggaatactatcccccacattgcaggttagttgagagcctcttcaaaagaccaacgtatcctgtaaaattatcacattagaattccttttatatggattccattggcagtaatataagcagaccaataaaaaagaaaaaaatatggatttacttgattacaaaactgttaaataattctttgaggataaaatagatttagaccaagaatgtcaataaaagggggcaacagagtaaaggaaacaaagagtttcagtggagaataggagcaatttaagtgtttagagattttttagtgaatatctctctgacattgctaatttcactttccaattatataaagtgatgagaaattgttgtatttatcctttacctaaaatatatttttgaacaactctgaaatgtttttatcagatagtttaattaattaaactaaggataattactggtggcaaaaaccatatgcctttatttcattcttaaattgttcatttaaactcactaggactagttttccataggtcctatattagtaagtttaggctactataacaaaataccatagactgggtggctgaaataacagaaatttatttatcacagttctggaggctggaaagtccaagatcaaagtgtcagcaaattcggtgtctgcggagggccctcttcctggcttgcagatggccactttcttgctgtgtctttacacaggggacagagactcaaatttttctcataaagatactaatcccatcataggatccccattctcatgacctcatctacatttaatttcccaaaggcctcatctccaaataccattatattggggggtagggcttgaacatattaattttgggggacatgaacatccagtccatttaagtaccattacttttctgttactcttaggcaattaaatattcataagttacttgcactcacaaaaatttatagaaatttaaaatgtctaatcttgtgtcaaggtaaaaatcattcccctttttagaccatatagggtaacttcttgatgttgccatggcatttgtaaactgtgatggcactggtgagagtgtcttttaacatgttaatgtattataactagagtataatgagcagtgaggacgaccaggggtcactctcattgccatcttaattttggtgggttttagccggcttctttactgcaaccccttgtattagcaaggtctttatgacctatatcttgtgctgacctcctatctcatcctgtgacttagaatgcctaactgtctgggaatgcaggccagtaggtctcagccttattttacccaacccctactcaagatggagttgctctttttgaaacacttctgacatttggtgtcatttagctggtattatagtcatttagcactgatacactatggccttcaaagatgtttctttgggaccattataggtttttaggatatttctcatggcaaacaatcttctcttgccatcttcttatcaatctgctccctcttagagttcctgtcattccttctaaaggagaatttggagccagatccctttaaaatggtttatgccaactcctcctactttgtagcacttatgtagtctgtggcaaagtctcacatcttatgtcccaataaactctgggagcgcaacaaattattggaattcagatatccgttgtgaagccaccctctcacttaaaatagctatgtagccacgcaatctgagctttagacatttctcaatgtgcacctaaggtgttccccaaatatggtacacatttcaagttctctgggtggtctcctttatgctgacatcaccacccttcacctcattccccatggcaggacaaggaggtctcagagaacactatcacctctacccaaataaatcccctttataacctcatctaggttggtaagtggctatgaataacaacactgatttttagaattttctttgcaaacctggtctagggaatctgttcttcactttggaatgtgaatgctcttggcagctattattttcccatcaggttacagcctcagtgaaaactgaattataaagggaccaattttaaaatcttgttatggtgctacatgaactctttgatgtttcccacattttttttctgctatgtacccatcagatgagaatttctaccaaccctcactttccagaaagaagatcaatgtatgtttggtgcagagcaacccataactgatttctgttcaacataccatatttattcagcaaaaattttcagtttaatataaaacacagtatgaattttaatggattttagtctcctaggcatatgtgctcaagtttttttaaattatcaaaattctcttactccttctatctttgtagctattacattttttaaatgaagaaaatcgatatcaaatactccaaatgcaatttatatcagaaaattgatttggacttaagtacatgttaggaaaatattaggtacattaccaataattcaaagtataaaataaatcaccaagttagtattattttttaaaataaaatgataaaatttcattccctctttaggcaagtgactttaccatttcctgaatctgtcattgagtggtttggcaaagagctgacagatgaatctgaagatctttttaaaaaataactgcagactccttaccatataatttcatgataatcaatatttgctgaatcatctttttcttacctatataaaatcataacaaaatatacattcaatgtctttataaaactaggtactcctgagaaattaaaaattacctttaaatatattttaaaagcattttagctatagtcagctaagctatctaagttatctcacttagtttacactccttactataatgcatcaataaacttcatgttaggccgggcacggtggctcacgccagtaatcccagcacttcgggaggccgagacgggcagatcacgaggtcaggagatcgagaccatcctggcgaagacggtgaaaccccgtctctactaaaaatacaaaagaattagccagacgtggtggcgggtgcctgtaatctcagctactcaagaggctgaggcaggagaatggcatgaacccggaagttggagcttgcagtgagccgggatagttagccactgcactccagcctgggcgacagagcgagactccttctcaaaaaataataataattttaaaaaataaaaataaataaactccatgttagaagtagaaacctgttaaccaactgatagaaaaccaatcaagataaaatgtgctccttttgtctccttcatcccctggtttagttatagctagatgtatagttaatgttcataaagaaaactagtaatgaaatgccttccacccatattaacgatgctacaacatttttatttgtgttaattcttttttttttttttttgagattggtacatcttatttcattgactagaatagaaatgctgtgtagggcattcatttaaaatagtttaaggtaaaaattaccctaaacaaactggctgttatttctaactctgtaatatatattatttgtctatcaaggttaatttcaaaattctaaaacttttgtttccattgaaattctttcatatagaagtctagaagttctttagtatatagttaaacaacttatttatggattgcccaggccaggttttgtctagctgcaaactggctttactttaaaatcacatactcttgcttaagtaagtattaaggaaaggaagaaagaaaaaaacaacaaaaccaaccagagccatgcattattttaaaggtaaaaatctgctgggaatagaatttcgtgatactttcaatgatagtctatcagtgtacaaaaaggaggaaagtaaaaggtaatctaaaggaccattctttttctcattaacatctcaagaacatacagttctctagataataatatcactggtctctgctactgaaagctaaagaacttttaatctccaggaatctgtttctgtttgtgaaatagatgactgtgctttgtgagtgctgattactaacctatctaaaaacatcaaatgagattaaagttgctgaaattttagaatcaccattcatctaaggtttgtaataccattttgtagaaattgttctaataaatctacagaattcagtccttcacacattaaatgtcagcataatctctgttttaagtgtgagattcaggagtgcatgcattccttgagggtgagcaaacacttagatcctatgttaaatttgctttatgtttaacccttcaaaaatcttaaattactatatgttttatcctttctagattaatttatgtgtactaggccttttaaccactttatgtgacatgaaaaacataaaataagccttaatttttcaaaatgtgagaataataatcaaaaaaagagtagaaaagcataaaattgacagggaagatacactataaaagcagtagtttaaatccataacactttacagaggacacaacattcaaggcacctattccaggctgccaattagtaagccactggccttgtataaatactgtcattttttcatatataatatagaaataggaacacttaccttgcctgatacactcgtgttaatatcaaataagataaagaatatggaggtgctatttaaactgcacagtagctattcaaatagtataatgcctccttcatctctagaatgtcatgctttgcaaaatatacttatcactattttatttggggcacagatatgttcactgaatttaaatattatttcagttctttttaaataatatagtactgatcaataaaaagcatgtaatgacatcttattattaattaaactatttacaaggagggctgagtagtattttcagatctgctccttgacatttatcttcaagataagcacaatagacttcaagaaatatcctattagtggtatattatgaaaaagaaaagccaggctgtgggcagtggctcacatctgtactcctagcacactctgggaggccaaggcaggcggatcacttgaggccagcagttcaacaccagcctggccaacatggagaaaccccatctctactaaaaacacacaaaaattagccgggcgtggtggcattcacttgtagtcccggctactcaggaggctgaggcaggagaattccttaaacctgggaggcagaggctgcagtgagccgagatcgtaccactgcactccagagcctctgcagcagagcaagactctgtctggggtggcgggctggggggaaggcaacaacaaaagaaaagccagattacaaaaaaaaatatgtaaatgtgacttcattatttcatttagaaacaaacaccttatgactatatgtaaagatgtgaaaagtacaagaagagcacttggcggactattttctcttttggttgctattaaaatatttaacgataatttgtagacaatgagatcataaatgatttttcttaactttttatgtcagagttttttcataaccaaatttaatacattaattatatattaattttctaatgactaaaaaatattcccatctgtatttctccttcatatggaagactagtctagcaatcaagagcatagcctttggaatcagacagattggggtttcaatataggctccatacttcactagccatatgacctagcaacagaaatgaatctccctgccggcatggtggctcatgcctgtaatcccagcattttgcaaggccagggtgggcggatcatttgaagtcaggagttcaagaccagcctgaccagcatgatgaaatcctgtctctactaaaaatacaaaaaaattagccaggtgtggtggcacgtgcttgtagtcccagcaagtcaggagtctgaagcaggagaatcgctttaatttgggaggcaaaggttgcagtgagccaagatcatgccactgtactccagcctgggtgacagagggagactccatcggaaaaaaaaaagaaagaaaaaaaagaaagaaatcagtctctctgaatctgtttcttcaactttagtaataggaccaatcccatttgtttgtatatttgatggcttaatgcctgagagttaaatatgctgtcttagttcattgtgtgctgctataacacaatatttaaaactgtgtaatttataaagagcaggaatttatgttctcacggttctggaggctggaaagtccaagatcaaggtgctctcacttggtctggtgagagcccagtctctgctttcatctcacttggtctggtgagagcccagtctctgctttcatctcacttggtctggtgagagcccagtctctgctttcatctcacttggtctggtgagagcccagtctctgctttcatctcacttggtctggtgagagcccagtctctgctttcatctcacttggtctggtgagagtccagtctgcttccacaatggtgccttgaactttgtgtcctctctaaaggaaaagtgctgtgttctcaagtaacagaaggtggaggaactcctttcatcaagcccttgtataaaagtacataatcccatttattaggacagagctgtcatggcctcatcacctcccagaggctccaccttctgatcccatcaacttgataattaggttttattatagatattggaaaagacaccacattcaaaccatagtacagggtaatataaattatttagcactattcttgatatataattgaaaactcagtgtgttgactatgatttttgaacacttattcatggtgttgaattacttcttttcttccctttgcttttttacatttattcagctttcatttggttggaattactctttaatattatgcttggaaaagttatgtaggtggcattttaccttttgcctttcctttaaattatagttttgctggttttaaagcttttcagtttataacctttctctctggattctggaagggctgatcaattggcttcttgtatttaattttgcagaagagaatgctaagggcaatttggttatttcttttgtaaataacctaaataggtctaaatattatgtttcaaatgttaatcttgttttttccattaatattatccaacattaggtaatctcttttcatttaaggacttgattctttcattacctacatttgtttatgttttatttattcttgttttttctttcattgctctgctatcttccagatgtgtgtctatacatatattttatttatttattttttagacagagtcttgctctgttgcccaggctggagtgcagtggtgcagtcttggctcactgccacctccacctcccaggttcaagcaattctcccgactcagcctcaggaaataaagattaacaattatcttactcatttgaaactctatgttttcatgtcatttgactaattagtttaaggaacatgcagccagcacatgtatagtgtcccctcttgtttttttagcaatttttaaaacttttattttaagtacaatgacataactgcagggtttgttacaaaggtaaacttgtgtcatggaagtctattgtacctaatagttgtttttcctgatcatatccctcctcccaaaatccaccctctgaaaggatccaatgtgtgctgttctccctctatgtgtccatgtgttctcatcatttagcttccacttgtaagtaagaacatgcaatatttggttttctgttcctgtgttaatttgctaaggataatggcctcaagctccaaccatgtgcctgccgaagacacgatctcatttatttttatggctgcatagtattccacggtgtgtatgtaccacattttctattttttgttattttcttttattttttttgagacagggtcttactttgtagactaggctggagtgcagtgatacaatctcagctcaccacaacctctgcctccagggctcaaaaatcctcccatctcagcctcccaagtagctgggaccacaagcatataccaccatgcccagctaattttgtatggagatacggttttgccatgttgcctgctcaggctggtctggaactcctgggctgaagcaatctacctgcctcagattcccagagtgctgggatttcagacatgagtcactgtgcccagcctctgtaccttgttttatttatctagtctatcactggtgggcatttaggctgattccatcttgatgctgaataaccctatcatggggaaaaccctgataccttcactcccccaaaataccaccaactaaaatctattccaactcacctctattgaaagttcatgacaacagatgggtttacacaggggttgtgcaaataacttgaaatcaaatattagacattctgttcttaataaatttcagcaacccagacaatgggaatttctttttgggtgtctttcttactgcctttccatccctccctacaatacacacgcacacacacacacacacacacacacacacacacacacacactcccctctttctttttgaactgacgtaaaaataagagctcatccttttagaattttgtttttacttgtagggtcctttgaaaatggaaacgtttttgttcacataagtgaaaaaaaagtcttaatagtatatgttattttattttacacaaattacagctataatggaaagggcactaaccgtgaagttaaatttggatttgaatgttggcttcatgagtcaatacctgtgtggctttaaacaacttactcagcctcatagtcttctcgtgtgtgaaataagattatcagtctcacaagactgctgaggtgattaccaaggaaacgcaggtgaagatgcctagagcatagcctgcttatgtgaataatgaatttttaaaaccactgggtaaataaaagatgtcactgtggtacatggatttttttatactttataaacattctctgagctcgcattacgtctaaggcactgccctagatgctttgaaaagcaagaaaaggaaggtacctgccctccggaagtttaaaatttagagataaagacaaatgcaaaaaaaatggaatgccatgtgtaatagagatgcaaagtgaataatagtaatacttggtaaaatctgtaaagacttcacataatatagttggagcatgaactaggtctcaaattttgagtgggatacaatccatatagacaaaacacgtgcagaaaaaaaaaatcttactttttgaatctaagaaatcactattaaacggtctattggcaagcatgagtaaaacccaaagactgaggctacagatatgaccagcttggagactttagacaaaatattccatttgtcttcttctgaatctatgcctctttgtgtaaattatatgtgcagtattcctctgagccaattttgttttgcatgagccagtaatgggccagtgaacatttatttcaagaaaaacagaagtatggtgtttattatagcatcctctgtagccagaataactaaataaaagaatgagtatctccagagatctcccccaccccccaaaaaataactagaagtttcagtaagctactgaatcagagaggcaaaaaggcactattttaatttttcatattttatttattattgtagaagaaatccaattaatatgcaatttgtttcaataactgagaaaaacatcccattatggaataaaggtagtattataaactggtgtcgtttttcatacaggatgactaccaaccagaactcagtaaggcaaatatttttccagaagtagggatgtgtttgagccaaatccactctcattttttaaatccatgttctttgtgacctaacagtgaagtttgattcattgaagccactaagtgatgaaacactatgaaatttactagcaattatttctccatttaattttatgaatttcctccagtttcactaatatcatcagcaaatttttcacacagacacacacacacactatgtggtgttattaacagctttattaatctgtatctcattagtcttagccttggctaattgtaaacatcaaatccatcataaaataataagtactcagccaggcacatgtggtcccagctacttaggaggctgaggtgggaagatcacttgagcctggttggttgaggatgcagtgagccatgattgcaccactgcactccagcctgggcaacagaaaaaaatcctgtctcaaaaatactaagaagaagaagaggtattcaaatatctctgaaagcaattctgaaatacttaccccaaagtgatatttgaacaactggaaaaagtgtgtgttctccaaaataactccttttaaaaatacaaccttaagattaaatacataaatatatgctgtatttgtctaatttttggcaggaacacatcacatcacttcatggtttcttataacactctttgcattaccagctgcatataccaactctttgtgaatagggactgaatcttccatgtgtagctctgccattgtacggtaagtcctcacctgatgtcatggataggttcttggaatctgcacctttaaggaaaacaatgtataacaaaatcaattttacccataggctagttgatatacgtaagagttatgttcctacatctctcatcacaaaaacatcaccgaagttctaaatagaccaaagacttccaatattaaaattgaaataaatgtgagctatacatacattgaagaaagattagtaaaaacaagataagtgtttaccaacttattccacttcagggttacaggtggcctcagagcctatcccagcagctcaggcacaaggtggcaactgaccttggccaggatgcctgtccaccacagggtgcactcatacaatactcactcactcactcactcactcactcactcactccctccctccctcacactgggaccatggggacaagcagatgaacctaatgcgcacatcaatggaatgtgggagaatacaggagtacttggagaaaacccacacagacataaagagaacatgcaaactccacacagtatcactgccggagattcttttttttttttttcctcatcaatttataaccaaacaatgttgatcaaaatgacgtaactagaggaccttctgtgtataaggattgaggactattgtaaaactctaaagaaacaagggggaaaaaaatgggcccttggcctaattagcatgggacagcaaagaaatgagctttcaaaagattaaatataaacataagcatttcctctttcagctgaaatgagtatggtgaatattgtgtaatgatcagtgtcacagcagtcccagccatgtcccaaccatgtattttctatttcagggaggaagctattgtaactctgcagggtctcactcactttgatttatgctgtgctctcagctcctgaaaaattctttagaacaacctgagaagtgactgtaatctgattgttctctgggagcagtagggattctatgatggcactagtagtgttctgtttttttctaatgagttctagtaatgaatggggagttggtacccaaactattgagaatctggctggtattttgctcaaaaagggtgtactctccttagaaaatatactctgtactctagaggatttctccttcagagccatttcatgatggggaagcagacttttagagatttgctttttaaaaatatgtgtgtatatatattttttaaccaagaagaaaacaattctgcaaacattgctgaaatgtgtaaagacaccttcatggtatatcctattttttacttggagaaagaaataatatcaagaagcaaaagttattattcatgtttttctgcatttttattaataaattttgtaactaattctaaagtatctggctaacagagaacaatatttgtgcatttaatcaaatgcacaaatatttgattatttaatcaaagatgacaaaaactcaactagctgaaaatatttcatatctatgcttgtttttatatttactcattatctacatgatttttatttagtgtgccttgatatatatttttcttcaacaatgtgtaagattctatctcataagtcttgttctcttcttagttctaagcatttactactatttagatttgtgatgaggaaatgaggctgaaaatgatatgacacagtgaaaaaggaactaatagtgtcagcccataaaactatctcaggaaatgaggtggaacctcatagagataacctcgttaagaggagtcagaaaaatgtacattgcacatccacataattggaaataggctgtgataggaaactaggaattaccaaaatgattgcagatgtccttgactcataaggctgattttcatttagcacaccttctcatatacaggtggagcaaagcaatcaattgtcatagaatcacagaatttttaattttcaattgagttctgagttcttccaaagcagccaccgtacaatgggaccatgtttatgctacatggtttataggtacctgcatttaatagcttagactgagctttgcagttcagctgtatatgtttcaaaaagtttagaaccatattaatatgtatgtctttggttaatatatgaaatattttgaaatattgttatacgctgcaaacaattgattagttacaagcccagccaaagtgctaggccttgaactttgagaaatagaaagtactacacaaagcatgatttctaattatggggtgcatgaaatttggttgtgtcccccaaacaaattatttcagtggtaagatagtgctggaaaataagtatatacataccaaattaactggtacaagaaattagggaaagaatttaagttttttggctcagtaccagataaatttggattcaagcttcttctttgccactaagttgctgtattgccacagtaagttccttacctttgctgtgtctcacttttttcatttacaaaacggggaataatatagctataatagcataggatagctttaaggatgaaatacaataccgagaaatacagttttgcaatacttggcactctgtaaatggcagctatttacagcaactcatgaaagattatttataagtttggtgacttaatggagatggggttttactggaacattgaaatatattatgaatttcataaatgtgaaactcataggaaaaaagtcaaaataggaagcctcgaacctagaaatagtaccagatgtgaaaacttgttaaataatttttatttaaagctggtttccaagaaatataaaatttccaagcaatgtttttccacctgttgcaatctagtcaagtgtaaaattttcacctcaagtaaaacatcactcataagcacatcttgggggaaaaatacttgttagcaaaattcatttaagaaaatattaacacttcaggaacaaaaaagcctgggtaaataactggttataagacttaactttattaatatatttctataaatttattggaatattgttggacaattgtggtcattatggtaatggtacagaatgtacatgtaataaattttgatgacatcgcaatgttaataaaatacctaacaacgttgacagggagaagagggaaattaggaagcaatgtgggaggttcaatatcctcatcttttacataatgtttgtatttgaatccatctaaaattgaaaaattgtttataagatataatgacttaatgttaatgtttttatttcttctcttaacctgaaagtgacactttaaaatgtcaatacttacagtgcttaaagtggatttgttaaaaatcagtacattttttcaacatcacttcattaattttttttcatttaatctaagtagtatttatcccaaattgcatttagtaaaagatatttcttgcttcatatccagatctaggacacagctactttggcccataaggaaaaattcatttggccgtctgcttaagtttttggcacttcattcaatatatttctgttactttaatataaaagtttttaaaaagcaattctatcttttaaaaatatttattctcctaatcatgttttcatttgatgtttataatttttaattctgagtagtgagactgagggtttctaaaaattatctgtagttttcttcattgtttacattctttgagtaaacatatgtcttttatactcaccaaaaaacacacacacacacattctaacaaggcatgaactgttttctatttttcacttgaagattagtcatttttcttcaaattccatggaattttgttagacttttatgatacaatgtatcatcttcttccttgaatccattgtgtatacgtatttaatttacaatagtaaaattatattacacatgttagccgtttattttaactttcttcaaaaagtaacatgacatttagttatttgaatctaggaaagttaaattctataaaattacaataagtgtaggctacaattttaatcaaaatgcacataatttttaaagtgaatagtttaattatcatttaataatatcaaagttaatctcaaaaatttgattaaaaacacattatcaaataattaaatgcttagagctaaaaattgagaacatttggtgcttattcaacaaaattccaagtttcattgttttagaatattaaaaatcgtgttttcatgtgttatagtatacaccaaaaatacttatttcccatatactctcaatttttttcattgaacatgttcttttcacagggaaacattccctttagtttttcagcttttttgtttgtttggttttgttgtttggttttgttttttgttttgtttttgtttttctgagacggagtctcactctgtctcccaggcgggagtgcagtggtgcagtctccactcacggcaacctccacctcctgggttcaagcaattctctgtctcagcctcccgagtagctgggattacaggcgcccaccaccacgcccggctacttttggtatttttcgtacagatggcgtttcaccatcctggccaggcatttcgtgaactcctgatcttgtgatccacccacctcgcctcccaaagtgctgggattactggcgtgagccaccgcccccggccagtttttcagctttttactcctccattttgaccttccgtgaatgagactcactctctcaaatccatatccattgaagtctcttcagatcagtggtgtcttaatattgtttctaaacctcctaatctcattagaaatataagggtaataagaggatggagaggaagtttccgactgagatcaggtggttagaaaatagttacctcttcctggattgtctagaaagtaatttacgttgaaactcgcacatacattttaagcccaatataatactctgtactatagaactaaattccacttgcgtgaattacaactactgagagagaatacctagaaccgaattcaatatatcatattgtattaggccgttcttacattgctttaaagaaatacctgagactgagtaatttataaggaaaagaggtttaattggctcacagttctgcaggctgtacaagcatggtgctggcatctcttggcttttggggaagcctcaggaagcatttattcacagcagaaggtgaagcaggaggttgcccgtcacatggcgaaaacaggagcaagagagatgactggcgggcaggttgtcacacacttttaaactactaaatctcgtgagaactcactcactattgtgaggacagcatcaagccatgaggtatccacccctatgaccccaacgcctcccattaggccccacctccaacactggagcccacatttcaacaggagatttggaggggacacatattcaaatcatatcacatatttagcgtcatttcaagttaattttgtgaaggaatttgtgtaatcaaaatcctgccagtctattgaaaactttgaaaagtcgaagtcagaaattatttcaaatcgaatacactactattaataaaattacactgcacaaaatctatggttttgagagcttatagcctagaagaagcaggaaaccacgtaggtttttgtgggggtctacacataagattgcctcaaataccctgagcatgcaatgtggagtccaaagccttcccagatttcttcaaactcctagcatgttatgctgccttgattctttcccccatgtgagctctatagctgtgcgttgttgaagaaatcagagctgagtagcagttaaaatggaaaaacaaaaaaaacccagactttatttaaaaactattgcaataggggaaaagagatttcagtattgaatagaactgagctcagttccaaatatatcatggataagtggggatttatattcaagggaggcagtctggaatgaaaaattactgagattaagcatcaagagtagagggttgattctggtttaatatacctaacaggaatcttgctgaaggcaggctggagtgaccagccatcacttgggggatgaggaatttgatcagacattgaggttcatcagatatcacatttaggacgttttctttaaactgacttagcaagattctcattacaattgagtgatgccaagactaacagagacccccaaatgtagatgtctagttgggaacaggattcacaggtgccgaactaaagtttgactaactaaaacttaaactgaagagagccattgtcagcatgttatttttttttcacccagacaaacctaaataactcattcttttccccaacttctataaaaaaaaatcacttataacaaccttttaacaaatgttaatgaaaaattgtgactagtaaggggaggtcacagagaggaattttgcctcattttccattcttgttccttgttaggtatcttcccaaattatttcctggagatccaaatccttcttcctttacttgcaagaacagttctatttccatatttgcacagccactcccattcaggtttactctcaagaaaactgaggaaaccctgttaataggacccattattctcagaaagccagtagaattagaaatggaaattttctgctgacgtgcaattgatgctgtagtagcatgtgctacagttccgtgcccaggataaaatagagggcaccatgttgggagtggacagtcctactaaaggcatcatgaatggctccatgtaaaagatgactctggagctaaagcttgaaagataacatcttgtatagacggtcgccatgatcataaggtgaagtcaagagatgggagttgaggaggaaatattcaaacagatggaacaaaatgaacaatgacacagaagttccttttagctggagtgtgtgactgtgagtcacggtgtaggaatagagaggctcaggagagagaaaataaaatatgaaactatccagggagtaaggaatcaggtcatgaagaatattgtatatctgttaaaatatttgagttgaatcccttgagtcatctattctgagtcacaggaatatgttacagcatgcattgaaaatgtttaatattgaagaaccaaagtctgactttttctatcctatgtgattcctgcattgcctatatgatactctcactcagttggattgcaatatacttttttgagtgggcaagaatgggatgtaattaaagctagcatactgggacatgttcataagcctagatgctcccaaggatgtttctttcttctgaaaaccatgtttcatgtgggccagagtacaaaacaaatattgagaagcattgttttgggcattaaggattttaagcatggaagggcaaataatatttgatcttttagaaggatcattttggtagacaaataggatctacttggcagcttatcagatataactcaaagaaaaattggcaaaggtctgtattaagtagtaacaacagaaattaaaagaaggcaaattacatgaaaactattgtgaggctaggaacgagggaatgggactgaagggctcgttaactgcggaagggtaaggaagacaatgtgctcagtaatccaccctttaatgttggctgtgtttaaagccattgaaaccactttggaagaactcttgggagacatgaggcagagggtgagaaatgcctgaagacctttaggagaatttagagcatttagttctgtccaaagtaaaatccaaggagcaacgctccaaagttaagtcaatgccatgttctgggtaaatgcctcatgaacggaaatcctaagatttctgtacaatttcctcttaggactcttaaagtctttaattaactagagatctagtatcaactgcactaaaactaagctacttcaaacatactgaattatccattgaaacccacactccagcaggtgtcttgttagtcaaactgtcaccctgcctagctgacatttcaaactcaaaaagtcttgaggcactcagattgtcaaggtgcatgtgactcaaaagccacatgagaaaaagtactcaaatgtgggaagcctagggatgttggatctggagggatgtggttttgtgaatcctggccacctaattggctatgaataagtgaaatatgatccatatattgatgtacctattgatatgagatagtaaaaataattttttcaacttcacgtgcaaaacaagtgttttctttcagtctgtactcagtctcaggcattaataaatttgaaatttttctgtcatttaaggatacctattcgcagaggtgggaagatggtttctagaactaaattttaaacatacaattactcatgctcttcagtatagtaagtttatgtggctgtttattctgtcttctaaaaggagagtattctttattcctttttcaaaacctaaattcttatgtaactagaagcaaagattatattttgattaccttgtggtaagaatttaaatagaaatgacagttattacaatttattttggcttagacaagttatactatttctaaatctggccactttcaaagaaatgaaaaaatcttaatacatacagatacacattatttctcactgtcacattgaaaaatgtacatttttttcaaaatttccaatttactctaaggccagaataaaaaaaaatcatgcatataaaaagggcattgttcgaaaggtataaattctggaaaactcctaaaacagtctctgactgtccaaggtaacttttcagggtaaactgccattattaggttaagttaaaatgtgtctcaaaaaaattagtagattaaattacatttagttaaccaagaaatctgtatttattgaaaacatgctgtttgcctcagttcaggtttacattatagctcaactggcattctaaattacccactcttgcaacttgtattgcttcttttttgtttcattctttacattgttataaagtgttaccactggaactcaaatcaaattgtatcactctcttacttagtaaccttgtggctaccacctccaactctatcttttgcatctcatatacaatcagctgtggaaacactgcagtcccacttcccagatcgcttattcattcatagatgtggttgggggaaatttacaccctcttatctaggaccagctcttccccccacaccttcttctccaaggtaattcttatgagtctgtctgatatatttatttctgttttgttttcctgatgcaaaacattaaatataataagtataatgattgaaagaatctgcataattcacagaataagaattccactaatttagttgtacttctaagaataaaaatatagacatatcacaatcatcatgttttttggtctacttcaaatagacaacttcatatttattaatcagtgaggtagaatccaaactgaattcaattcttagttttgagttcttagtccttcaaattccttttacaaatattttgatattagtatatttatattcatttagctagaaattatggtccagtcctgttctcattaattaattaacttaattaataggaatgtctgagttcatgtcagggcctagaagactcatctgctgtgggaaggcatgaattccccaatgtgtctgggcatactgacaacaaacagggagagctgcccttcttaataaagtttgattgacagctgtattgtgctgagtgtgattatatggtgcctagtcctgacgggttcagtccaaaataatgcaccatgtggatcacaagcctgctttaaatgttctaccattttataattgtcaagagagagaatttagatagaatgtcagtcaagtttttctgtttacctctgcagccatgagctttggttagataatctctgcgttatctatatcacctggatttttatgaagctcataatccaaattcaattatttttatgtttttctaatatgattttagggtcccttatacagaaaaaagctgtagtagcaggtaccatttctaattcatatgaatgaaacgaatcccaccaatatggtaccctttttcagtttctataaaataatctccattccttaaaaaaatacttactgtttgtcaagaagatatatattattaatttgattctcccatttttttactattggttttggtatcatagtctcttatttaaataatagatgcaaacacagtagagaccaacagataaaatgaactcaaccaaattttctctctgcaattgacacacaagtaaggcgtttgtttaacaggccttgtgtgtatgttttgtagtaatttaaacacacagaatatactttcattttcatttgtctggaaaacaatgttgaaacctttttttttttttttttttttttttttgcctcctgagtagctgggattacaggcgccacaacacccagttaattttttgtattttttgtagagagggggtttcatcatgttggccaggttggtcttcaactcctgacttcaggtgatccacccacctctgcctcccaaagtgcagagattacaggtatgagccactgtgcccggccacaatgttgaaacattaacatgaattattacaatcactttctcattgattttcccaccaggtgcaaggaaccatcttcccagctcccaatttcaatcccataatggatgcccaaatgctaggaggagcactccaaggatttggtaagtctgattatttctaccatcttttattgtgattattttttgctttaccttgttttaagactatactgtgggtataaaatagttgatgtcttacaaaacacagatacagattagacaaaaaaaaaaaaaactgagcaaagaagtagaatgagaagaaaaataatataaaaagacaataatgatgaacaaatttgcctttagaaattgctagtctaatcttaaaatgtttgccttaaatccataagtgcctcatcactaactactaaatgaaatctccactaaaacaccttaatccaggatagagcattctttttaacctttgcttctgttttctagcttgtttcatttgctatttgctatttccacttccagtcaatcaaactttttgctattcccccaaatgactctgcttttcacatctctgtaaattggcccaatcacttctctgcctggaatgttattttcttctcttgtctacttttcatctaaattctcttcttcaagaatctgttcagatgagccttcctctctgaatccttctttgggcactgcaagctcaatcagctatgccaaccccccaggcaccttacttcctacctctcactcccctaatctcatttgcactgtgcttatgtttgtctcacctgctgactggactgtgaactcccagagcttggagtttgacatagaggtgattcataatgaatgatactaaagtttagaaaaagtatatagagagagaagaagggaggacaattttgggattcttttacaaaaaaaaatattatatatataatttttaagatatcatatggaggtattaaactttcatatagtttcctacaataaaacctgttttaagaagactcttgatgagcataaagacaaacatagacaacataaaagaaatctttgcataaggcatgcaaaaactttcataagaaagcaagctcttaactttaaagacaaggtcgcctttacaggagcttgactgtgtgtgtgtatgcatgaatgcacatctgtgtgttttattcactagcagtatcccataggaaaacaatagaggacttaaaatatgctcgctaaagctgactttaggagtttgcaatgctttcatgccttttaaaatatcagtcatcactagaacaataaaaagacaagttaacacaaagttatgaattaactttttattgaggagtgcaatttttgctttaaaactatgggtcacagcaatctgttcaccaaaaagtttttctttgctccagtttcaatgttcctgtcattgcaattttagggtcagaataaggattcattttgaccatcataatttgttgcttatcagtgtattaggctgaagtacgtcaggaggttttgggctttgattgcacggtgtccactgtagcatgccagagcatgaacacagctcaaattgctttaaagttctatccatctccatgactctggcgaagtgttattgaaaaagacaataactaatgtttttcttagctactgtgttttatttagaaaaatctgaaagcaaaaacgtattctgaaacaaatgaaagtgagtagctctgatagaaattgctttaagttgtataaaaatttactcatcatctataaaaagaaacacttattagttaacattccctaatagtacagtctactttccaatttatcaccacttgaagatactttcctgcccatgcattcttataaccatttttattttgtatctattaacatgtgtaattgctaggtcagccctgtgagatcctggacaaccgaagtcatttttaacctacattcctaaatcttgacaaaggagaacacaagtcaaaattaatcttttttgaaatgctcagtgctattcagagtggacaatctcagcttgttcctgatctttctgatcattaagtatgatgctagctataggatttttgaaaacgttcattatgaagttaaggaagttcccctctattcttagtttgctaacagtttttaacttgaataggtattggattttgtcaagtgatttttcttcatctgttgatataatcacatgatttttctcctttttcctgttgatgcaatggatgacataactgatttttaaatggtgaaactgccttgcatatctggaataaatcccacttaatcatgaaatataatgccttgtatgcattattatatctgactttcaaactttttgaggatttttgcatctatctatgctcatgagaaatgttggtcagtaattttcttttcttgttgtgcctttctctggttttggtattagggtaaggctgacctagtagaaagagttatgaagcattctctatgcttctaatttctgaaggagattgtagaaaattgatatttctttcttaaaagtttggtagaattcataagtgaagccatatggacctagtgctttctattttgtgggttattaattaccaccgacttaagtttttgatagatatgggcccattcagattgtctatgagtttgggtaggttgtgtctttgaagaaattgatccatttcatctagactatcaaatttgtggtcttagagttattaataatattttattatgattttaatgtccattgagattggtagtaatggctcctgtttcgtttctgatattcgtaagttttatctctctctctctctgtctctgtctctctctccctctcttgctttctctctctttccttaacctagctaaagccctataaattttattgatgtttcccccaaaaaaaaccagcttttggtgccatggatgttttctcttgattttccaatttcaaattcattgattattgctctaatctttcttttcttctatttatgttaggtttaatttgctcttctttttccagtttcctaagatgcaagcttagattcttgatttcagatttctttttgtttctctatatgcatttttctctaagcattgcttttgctcatctcataaattttgagtcatatttttactttcaatttgtttgaaatttttaaaaattctcttgtcacttcttcttagtctcatgtgtatttagaagtgtgctgtttaatctgtgtgtatttggggatttttccagccatctttctgttactgatttctagtttaatttcattgcagcctcagagcatattttgtatgttttttattattttaaattgttaagatgtgttttgtggtcaagaatgtggtctattttggttaatgctccatgtaacttgagaagaatgtgtattctgcttttgtggcaataagcattctatagatgttaattaaatccagttgattgatggtgctgttcatttcaatgataccctcactggttttctgtctgctggatttttaaattacttatagagtaattgacaaattactctagaggtgttaaattgcccagttataacagtggattcttctatttctctttgcaattctattatttttttcctcatctcttttggcactctgttgtttggcacatacatattaaggtttgttatatcttcttggagaactgacccctttaacattttgtaataacccttttattcctgataattttctttgctttgaagtattctttgtctaaaattaacatagctactccaactttcttttgattgcatttgcatggtatataattcttcattctttacttttaatctctctgtgtctttaatgttgatttcttgtagaccacttagtgctattaagaaataattttactcacctcagttaaaatgagttttatccaaaagacagacaataacaaatgttggcaagaatgtggagaaaagagtacccttgtacattgtttctgggaatgtacgttagtaccaccactatgtggaacagtttaaaggttcctcaaaaaaattaaaaagtgagttataccatgtgatccagaaaatccactgctgggtatatacctaaaagaaaggaaatcaatatatcaaagacacatctgcattcttgtgtttgttccagcactatttacaatagctaagatttggaagcaacctgtgcatcaacagatgaatggataaggaaaatataatacaaatactcaacagagtacaattcgaccataaaaaagaatgagatcctgtcatttgcaacaacatggatgaaagtggagatcatatgttaagtgaaataagccaggcacagaaagacaaacattgcatgttctcacttatttacgagatctaaaaatcaaaacaatttaacacatggacataaaaaagtagaaggatgattaccagaggttgtgaagggtagcggagggctgctggggactcgaggatggttcatgggtacaaaaaatagttggaaagaatgaataaaacatactatttgatagcacaacagggtgactatagtcaataataactgtgtattttaaaatatctaaaactgtgtaattggattgtttgcaactcaatggataaatgcttaaggggatggataacccattcttcatgatgtgcttatttcatattgcatgcctatataaaaacatcttgtgtaccccataaatatatatacctattatgtaaccacaaaaattaaaagtaaaaaattaaggaataattttaaattttagtaataattatgttcttgcctaggaggccacttttacctatttgaccatacagtcgattctcattattcacaaatgctatatttacaaatttatctactcactaaaattgttttataacccccaaatcaatatgcacagatatttcgtggtcatttgcagacatgtgcagagaggtgaaaaattttagtcactagaatgcatattgctggttgaaatcaaacaaggtgacctctgccgtcttcttttagctttcatgctgtaaataagtcctttatgcaatctatgtagtgacacaattttgcatttttatgctttgcttggtgattgtgctgtttaaaatggccccaagcatagtgctgaagtactgcctagtgtgttcctacgcacaaaaagaagtattcaagaaaaaaatatgtgtgtcacataaactaaattcaagaattagttatagtactgttgaccatgagtttaatgttaatgaattaataaaataatacatccataaaaaataatagaaaatgtattgatctctgcacgatgctgtttggaaaatgctgaagtaacatctattctatgttatgaagtatggaaaagatgaaaaaatggctgaatttttgggttcttgagactataactgataacaaaattaataattttaaaaaataatcaaggcagtcagctttcttttgaaagcagtgttgggtggcaggttagaaaaattctgtagatcaggaggctacagaagagctttaaaaatatctcttaaatgtttatacaggagaaggctatctggaagtatagttttcaatgctaacaagactggcttgtttcataaggacattggcaaacaaacataatgcaaatgacatttcagttgacaaaaaatattgtaaccacagggttacagaaacctaaccctgcattttccctaggaacaatagttcagtatttactaattcagtgttcatggcaaatttgtagaatataaataccacatacaatgagtcacttgtacaaaataaaatttgataaaattatgatggttcattatgcccaaattttccattaaaatcagaaaaagataaattatttagaaatccctgacctaaagcactaggagaagaaggagaaaaacttataatgattacaaagaagaaatcaaagttgtgattatatgaagaagaggttatatatctagaaattcaagtttaataaaaagttacttaatattataagagagttcagtaacttctcaggatacaaagtaaacacaaaaatcagtatcacttcttcaattaagcaattatgtgttaggaaataaaacaaaaataacataactgggaatatcaatagaagtgcaaatataagtaactttagcaaaataaaccttcttgtcattagcaaaaagctccacaaatctttactaagtcttttagagaagaaaaatccttaaataataggttggcagaaatatcatgtaagtgacagaaagacaacacttacaaaattgattcctaaatttacagttattttaatttaaaaattgtaatacaattattgagattcatataaaatatctctggaagaataaataaacaagaattgctatgaaaacttaatagagcaattcagagcgctagattgtggataatctcaacagaacaagaacaaaaagtaagactataataatttcataaatgtgataatagtaagaataagacaaagaaagtaattttaaaatcttctatttattatcaaatatatgttcactttagaatgtccatcatgccattaacagattcctctactggttttgttttgttttgttttttgtttctgccttttagttcagggtcttaaccaggcttgagccagacatcatctttctctatgccttttcagtggagtctgccttttctctcagtagccattaatttctatctttgaagccaattctaggccttcctccctccctgttacagctttcagaccatttgtgcataaaataccctgatgctccccctgcttttcagtgatacagtcatctatgttaattcttaacacttgttctcatttgctggatatttcagcaccttattcatagccttcctgtgatcctaagcccatccaggagggacttaatttcaaaaaagatgatttgcttaacattctagcttttcaattcatttttctccttatctccattatatatcttcccttgttgaagaaaaattataccagatggaattaaacagcaaggaagattctgcagtagggatcaagactattgcaagaagggagagagagtgaactcaaatcctatgaaacaaaggcaagagagtttttaagcagtatggtgagatagtaggaaagaactaaaggatgttgggcagggagggcattggtcaatgtgattaggctatctgtgattgctaattggcacttaacaaagtcaggttcctgtcctcacacagacactgggaaataggaaatacagtttctatcttcccaatgatgacatttcaaaaggatggctcccatatccctgagaaagacaattttgggttgtcaaactgcaagaggctgggaggagacttacatctctaagaggcagagaaagaatttaaaattgcatgttttctaaaataaatgctctaataaaagggaggttaggagcctgtagttgggaagaaacttatctaaattttagtcaagctaagggaaaagttaatgtcatattgctgactctactatgactgcaaaattcatctaaactagttgtgcactaaaccaatctattagcttggtgtgttggcacatgaggaagtgaaggatacacagaccagaaacagtctatattagggaggagatagacagggtgataggtgttccatgaaaagcatgacaggttcactctatccctcagaagcacacagatgccttgtactttcatgatttccttctctattactcctccctccttaatatatgttcattataagccatatctctctattcaacaagaaagacacaatattagtcaattctcacactactataaagaactacctgagactacataatttataaagaaaagacatttaattggctcatggctttgcaggctgtacaggaagcatggctggggagacctcaggaaacttacaatcatggcagaaggcaaaggggaagcaggcacatcctacatggccttcctacaaggaggaagagaggaaaaggaattgcgacacacttttaaacaaccagatctcatgagaactcactcactatcagaagaccagcaagggggaaatctgcccccatgatccagtcacctcccaccaggcccctcctccaacactggggattagaattctacatgagctttgcaaagagacacaaatccaaaccatatgattctgcccctgtccccccacaaatctcatgttcttctcacattgcaaaatataattactgattctcaacagtctcctaagccttaactcatttcagcattaactcaagagtccacagtccaaagtctcatgtgagacaaggcaagtcctttctgcctatgagcctgtaaaatcaaaaacaagttagttacttccaatgtacaattggggtacaggtattggctaaatactctctttccaaaggggaaaaatcagccaaaacaaagggactagaggccctatgcaagcctgaaacttaacagggcagtcattgaatcttaaagttcccaaataatatccttcgactccatgtctcatatccaggccacactgatgcaagaggtgggctcccaaggcctcaggaagctccgcccccatggctctgcagagctcagtccccacggctactctcaagggctggtgttgactccctgtgcttttccaggtgcatggtgcaagatgtcagttcatctaccattctaggatctgaaggatggtggcccccttctcaaagctccactaggcagtgtcccagtgtgggggctccaaccccacatttttcccccacactgccttagtagaggttcctcatgaaggctctgcttctgcagcagatgtctgcttggacatccatgtgtttccatacatcctttaaaatctaggcaaaggctccaaaacctcaactcttgctgtccatgcactcacagacttaacaccatgtggaagccttggcaattttcagcttgcaccctctggagcagcagcctgggatatatctggggtccttttagccaaggctggagctggagcagctgggatgcagagagcagtgtcccacagttgtgcagggtagccaggcagggatctaaatccaaatatcagatgttgctcccatttaaacactaatcagcttaaaggtcaaggagccatttttttagtggagtaagagctgattgaagagacattatattttcttcactcccctgtacttttgattggatttttattttcctttcaatatttttttacaaatttaaggggtacgagtgcagatttgttgcatgcatatattgcatacttgtggagtctgtgcttttagtgtacccatcacctgaatagtgaacatcatacccaataggtaattttttaacccttgcccctcttccaccctctcactgtttggagtctctaatatctattatcctactcaatatgtccatgtgtacccttcgtttagctcccacccatcagtgagaacatatggtacttgacattttctgagttatttcacttaggataatggcctctgattctatctatgttgctgcaaaagacaagatttcattcttttttatagctgagtagtattccatggttccatggtgtgtatatgccacattttctttatccaatcatctgttgatagacacttaggttgattacatatcttggctattatgaatggtaatgcaataaacatatagatgcaaatatcttttttatataatgattactttccctttgagtatgtacacacagtagtgaaatttctgagtcaaatgatagttctatttttagttctttgagaaatcttcatactgtttcccacaaagatcatactaatttacatttccaccaacagtctttaagcattcctttttttgcacatcctctccaacatctgttattttaactttttttttttttttttcttgagatggagtcttactctgttgcccaggctggagtgcagtggcgtgatctcggcacactgcaacttccacctcccaggttcaagcaattctcctgcctcagcctactgagtagctgggactacaggcgcccgccaccacacccggctaattttttgtacttttagtagagatggggtttcaccatgttagccaggatggtctcaacctcctgacctcatgatccacccacctcgaccccccaaagtgctgggattacaggcatgagccatcgtgcctggccattaactttttaataatagtcattctgactgacgtaagatggtatctcattgtggttttaacttgcatttatctgctgattcatgatgttaagcatttttcatatgtttggtggctgcttgtatgtcttcttttggaaaaaaaaaagtctgttcatatcctttgcccactttttaatggagttatttgttttctcttgttcttattgcagtagcatgctgttttgattactatagccttgtagtatagtgtgaaatcaggtaatgtgatgactttggctttgttctctttgtgtaagattgcgttggctattcaggcccttttttggctccatatgaactttaggattgtttgtcataattctaggaaaaatgacactgataagctgatagtgattgcattgaacctgtaaattgctttggatagtatgataattttagtgatatttattcttccaattcatgagcatgaaataattttccatttgtttgtgctatctatgatttctttcaagtgttttgtagttacccttacagagatctttcacttccttggttaaatgtattcctagatattttatttatttattgtaactattataaatggaattgagttcttgatttggttctcagcttgattgtttttggtgtatagaaatgctgctgattttcatacgttgcttttgtatcctgaaactttactgaagtcatttatcaaatctaggagtcttttagaggagtctttatagttttctataagatggtaagatcatatcatcagcaaactgagatagtttggcttcctcttttccaatttgggtgttttttatttttttctcttgcctgattgctccagctagggctcctagtactatgttgaatgggagtggagaaaggaaatatctttgtattgtttctgttctcagggggaaagttttccctgttcagtatgatgttggttgtgagtttgtcatatatggcttttattattttgaggaatgttccttcaatgcctagtttaaagtaatggcactaaattaggagataggaaggatccaggcttcatcaagcatcattacatgatttccaattttagttaaaattgttccctgctgtaaaataccatcagggataatgcgtgcatactggttatgatcgttagataaaggattcttcccaactacaaagtagcaactttactaatcttcaaatattattcttttccagactgtgacaaagacatgctgatcaacattctgactcagcgctgcaatgcacaaaggatgatgattgcagaggcataccagagcatgtatggccgggtaaggccactttatcttgacctatttctagggcaatctcttgagaactaaccacactcacggataataggtattttttttttcaatctcacagattgcaaatatctcagacatcattatatgtcagatacagttcatattcctcttacatgtttcaaggaataaaatctatattatgaaacaaatatacatgtgagatatgttcacactcacagtgaccagtgaccacaagttctttccccaaaatcattcagtgtccccaaatgaaaagttttgatgaacttacattgccagtgggtccaattaggcttaaagtgttgtgctggaaacacccctgtggcgagctttagggaaggcacataaaaaattaatgatcaccagttcaaaatataacagcttttcctacagttccttgcaggtcctcacctaactctcaaccaaagtgaattctctaccagcttttcctttcaccagcatgcagctatagagaccattaaaaaagaatggcagtttaaaaatagtttaaggcaataaaactatccatagtgttttaaagtaatcatactctaatttcaaagcaagtaccattaaagattccttgcttttgctatgcatttaaaccacaaattcagaacaaaaactcttcaggccaaaagtgcctgaaacaacaattacttcatcagctgagctttatcaatgaaacattatcataaaactttctcagtagagttaatccatgtaaatttactccacctctaaaccccagtctttgaacaactatagtagatgaaataaaagatatccctcagctttagattgaattaataatccaaaagctactatcagtagtgaccttagttgaagtaagccaaagtagaagaccagtgatatcttcttttccacataaactgttacctcagcctatgttccacctacaccagtactagttttcttttgaaagagaatataaaaactataaaagttgtatcactggtaatctaacattgttttaatatgcatagtgctataagaaatgtctttttttttttttctttgagatggagtttcgctcctgttgtccaagctggagtgcaatggcgtgatctcatctcactgcaacctccgcctcctgggttcaagtgatgcccctgcctcagcctcctgagtagctgggattacagctgtgcgtcaccacgcccagctaattttttgtatttttagtagaaacggggtttcaccatgttagccaggctggtctcgacctcctgacctcaggtggtctgcccacctcggcctcccaaagtgttgggattacaggcgtgagccactgtgcccagagaagaaatgccatttttaagtaacttttttttaacccaaaggtttacatacatttttgctttttacaaatcaggttaaatttagactgaaaacattactttatcaagctctacaaaactatgctaaagcagattaaaacaattttaaaatgaagtacttacactcaaggaatttaaaatctactaaagaatttatactccactgaagaacttttcactgtacatataaagtctcagagtttgttaaaccctcagttttgctgaataattcatacctcctggaaaaccttggctgatacactaaattgcactgcctggaaaactggaagtcatgtttgcctctttcctctgaaatacccttgtcatttataatcaattagcaagttctgtaaattatttctcttcacacatttctctctttaaactgacttacacagtcttgatttagatcttcatcattttgtgcccagactaatgctgaaattcctaaatggtcctgtctacccctagtcccttcccactccagtctatccccaaaccgtagccagaatgactcaaaatctaaattttcacacatcactttgccactttaatccttgagtgtttatcttgtttctccctacaaacatccgtgtttccatgcgctactaaaaagtatggggaatcctcggtccttgatcatcttgggagtaagataatggccaagtgacaattcaaagacagcagaaatctttacttgaagggaaagagggagcagagagtttatttaaagagacaggacattctgaaagatgaggcagagcaggctgctgaaagagaatgggccaacagagagtcctgggttgggtttttataacattggatttttcttcacgttccctgctctgtctcaagtctctgccttttttcattatctagtttttctgcttctgccgtaagcccttgccttttccctgcctagtttccaccccaggtttgtggggccctcccttactattagtcagtgcgcatgcgtgggccaggggttggatacgaattctatctaatggctgcactgctcattaccaccaccccagtaaggtcgtacagcagtcaaattggtacttgtgcctatatatctcttaggaatttctcctttttccttttcctttctttctgctcacagttgactaattgtccacccgctacagcattagggattctattaatatgtaagcggtgggtggtcccttgggcctaagacttcccaagcttttcctttctcaagggctccccttgagtaacccgctcatgtctagccatctgcctacacatattcctacacatggaataaacctaatgccttcccagggcacacgaagccttgcttgctttgttcctgctctccgtcttcatccctctccccttccctaacacaattttcacctgcagtcaaatagaactgctatacttgtagttcttcaaattaaccatggctgcccctcaccaccagtcatgttgttttatctatcttcaataacctgatttcaataccacaggctggacacctatcatccttccaggtactagacacaagacctcacagccccccaccagatcgagtggaacagacttgggctgctaatacatcctttttgtaatttcctcacagtaactaatgacacatctgagagcttgtttgtatctgtttcactctaccacagtctaaagctttgaaagctgggatgattcttgttcatcctagagcttaccataaatgtctgtctagcataccaagattgcttaattaatgtttattgaatgacattgtaaaggtgcatctaactacaactcctccaataagacacaggcaggctttgactgctcctgtaaactttcccagcctgtcatgctcaccctctactctgtgtttcctgcttggttccaagagatccttgtgcataatgctactgggttgtgctggttcacttttacatcttgccaataacactgtaatctcctggaaaagcagggattgtaatatttgctgctatccctccagagcccagcccaggtctggcatagaagaggcatttcatttacagaatcagtgaatctaaggcattatattctgcctatttacttttttttaaagaaaaggaaaagcatcctttcattatccactctgtagttaaaatgaatctacaccaattgcctagatttcttttctctcattccttgccctggctgctaccaggttaatttctccgaccatcagtaaggtcttcttgacatctaccaccgctcacatttaggactacttcttccacctggccaaggtgtatctcctgctacttttccctttctgtggtaagaatgtatacattaacccctatgttaatcaatggtattttaaattttcattaacaagaataatcaagagttgacagaatcattttcttagctgctgagtgaagtacaattctcagcaggctccatgaacacttcttacttgacattttacattcgtgcagagtggctgaatttcatcagctttgccttacctattgcagaaactaatccctagactcaactgaaaatccacttggaattccgctgattgacatatttatcaaagtaattcatgaggtcacttctgatcttccccaccaaagcaagtgctagttaaaaacaatgcagtgacaccaagggaacaatgaaatgcccttgtgaatggggagaagaataaacagacaatgattcttggagaagttcaaattcagcattgatgcaattaattttctcatttttcatctaaaacagggactatccggtctaaaatatgctggtttctgtcattcatttaacccacatggttggttaagcaatttagtgccggggctgacttgcccaaaagtaaaacttcaaccaaggtcatctgactattaaattgtctcttccacagcttctcagtaatgcccactgttctcaatggagcaaacactcaggcttacaagggcagacatctatactgccaaatccctcacatctttcaaggttttgcttaagtgtcaaatactcaagagggcctaatctaaagctgtcactcaccccaagccctatgctagagctccagatacccctcacctgacccacaggaggaagtccagggcaagcctatcatctaacagtcttggccagtgagttaaggcaatcctgaatgccttctaaggccaaaatggtgtaattaagtgtcctctctccaggtgccaagattgttgttcttttttttttccttttctttctttgagacaaagtctcgctctgtcacccaggctggagtgcactgccgcgctctcagctcactgcaacctccacctcccaggttcaagcaattctcctgcaacagcctcccaagtagctgagattacaggaccgtgcaaccacgcccagctaatttttgtatttttagtagagatagggatttgccatgttggccaggctggtctcacactcctgacctcaggtgatccacctaccttggcctcccaaagtgctgggattacaggcatgagccactgcgcccagttgttgttcttacttaccactagaaaattgacctgttccattccagtagatataacttcagtttttttctatcatttccaactgatacctagaactttaatatggaatggtcaggtgcaagagggacaaagccatttgtatacaatttccggaaagctattatgtcccacacatagtgtaccacacatagtgtacccacaacaatgatccttaaccttatgatctgggatgatgagattccagagagaatccaagtgactgaaccagaattgagtttgaattcctatgtccacttttgattaggctgctacccagagaatagaccaactaggacaccctgaggttggtattgtaatcgcccagtggtttctccttgccctgtgacaagacagagctggtttatcaagacaggggaatatagagtttaattcacacagagtcagctgtacaggagacaggagttctattatcactcaaatcagtctctccaaaaacttggggattgggatttttaaggataatttagtgggtagggggtcagaaagtgtggagtgctgattggctggtacagaaatgaaatcatagggagtcaaagctgtcctcctccactgagtcagttgctgggtgggggccgcaagaccagatgagccagcttatcaacctgggtgttgccagctaatccactgagcacggggtctgcaaaatatctcaagcactgaccctaggttttataatactgatgtagtattgcttcccggccttttggataagatcaagtgtataacactgatgttttcctgaggaacaatttagggaggttcagaatgtcacagcctccagctgcaagactgctaacccataatttctaatcttgtagctaatttgttagtcttgcaaaggcagccaaggggatttgttttagaaaagggctgttaccatctttgtttcaaagttaaattataacctaagttcctcccaaagctagttcggcgtatgaccaggaatgaacaagtacatcttggaggttagaagcaagatggagtcagttagccagctctctttcactggaattgcctcggttgtaagttttgcaaagttttgctaacaccctacccactaaattatcctttcagtattaagagaaagaaagaagcatcatgcttagaaaaggtcagagtgaaatcccaaattttacaaataggtttatatgacccttttcctccatcatggtcattttccaagaaattgaaaggaggttaatattttccaggaaccgctgaattcagggaccaaacttccctactaagctaagtaggccagatgaaggtcaagaagatagagtcagaagtcttactgagctgatcaatttgcagcaataccagaagcctagggatggtggagatcatcaaataccttgactcttagtctattgttgagtggctttttttttttctttgagacagagtcttgctgtgtcacccaggctggagtgcagtggcatgatcttggcttactgcaaactctacctcccaggttcaagcagcctcctgagtagctgggattacaggtgcatgccaccacgcccagctaatttttgtattctcagtagggacggggtttcaccatgttggccaggctggtcgtgaactcctgacctcagatgatccacccgccttggcctctcaaagtgctgggattgcaggcatgagccaccatgcctggccttgagtggcatttttaataaaactgcatgatggtcagatttcaagtagtctagaaagccaaaaacatggcacagattattttcatgggccacagtgatgtggcggaagtcagctgattgacctgaaacagcaatattgtaacttgaaaaagtgttatcatttgtgaggacctacagaactctatgaggtaatcaaagtctgatgcaatccatctgccagaactacaggggcaatatcctatgaattgtgatttcctttgccaggaaaaacgcaagtcaacctttgacaaaagtgacaagattggcaagcggtggtaaccttggcgtcagaaacatagaatgctttaccatatgcccagcttttgagggtatatgtgttgtgatgtccagtctgatgatgaatacaggtagcaattgtgtgatctgagcaacgcaggctggatcagcacctggattccagttggtctcatcagagaatcagcccttactgtggacagctgcaagaaggacacaaaagttatcagaacctgcatttttccccccacagactacagaaggaaacttctgtttaatatgcagtttgtgtttttccaagagttaacccaaagagaaggctaacagcccaagagtgaataaaaacattgagtttatcaaagggaacactgttcagagctataatagccttgatttctgcccatggggcaataatcattctttttttgttctgcacaggtgtttctgagttgagtagccacagcatcccagtggacactatctggtttcagcttatctgaatcgccagtgaaccaggccatggcatttagggcaacagattgaggtccccattgaatcagcagcttgctgatttccccaaaagtttcccccagtggaatagctaccatttttttcatgtaaatgcaagacactgcagggtccaggcctactggattctttgatgtaccacttctatttgacaggtgagactggctggtttcttccaccttgccattcattgagtcccagttgatttaccctaatatgggaatatcaggcatcagggtcacaaggcctccatggatcaggcattcagtttatacaagagtccaatagcaggccagtagctgcttttcaaaggggatatacctggaattgtatcaggaaggcagcaagtttaaaacatcaagaggcgcctttgagaagctgctttcccttgccagaggctccaatcagcaaaccatctatcatagaaacttatgcctgaaagtgatcattaggcttatggggcttcataggtagtagcacttcttacatatgctgttttcctgtggaaagcatcccctccagtatttaggagcattcacagaagaaacaaataaacatgaataccaagtacgttcaacagtggaagttatactagtctaaaggtctccaatcataaggttttttgactttccttctccatttcaaaccttgttcaaacccatcctttgaattcgggtttactttcaccgatgagtccaggtagaatggtgacatggacacctgcatccaacagattcacatatccttgagtcctcctgctccacaaaggcaaatgggcatggccctagtccacaatgggaataggaagatctgtgtcccaccctcactcacttttttcctgaaagcagtagaagttggggtagagggaaggaaaagttcaggggacatgagggagacagaggctctgcattagtcagcatgacacgttgatatcctgtacagtggctgtgcacacctcaatcaaatgaatttccaatggttttggcctacacaaagtcctccatcaggtgcaacttcatcattactgaccccatgtgtttcagctttgtgggcccttgagccagaggtcagaaccacagttatttctgtcacagccaaggggtttgagtcctttgagtgaattgggtttgacccatatgtgacaattttttttttttttttgagacggaatcttgctgtgttgcctggagtgcagtggcatgatctcagctcactgcaacctctgtctcctgggttcaagcaattctctgcctcagcctcctgagtagctgggattacaggtgcccaccaccacgcccagctaatttttgtatttttagtagagacggggtttcaccatcttggccaggctggtcttgaattcctgaccttgtgatccacccgccttggcctcccaaagtgctgggattacaggcatgagccaccgtgcctggccatgacaattttttaaaatgagtcagtctttgaaatggactctatcttacttgctaacctatgttcacaataacatctcttacctcaagttttttcctgtaattgacataggagctggggaaattttctaggcacatattattattgatcaatatttttattccaccttgttttatactccctcaaattagtcattattatgccattgtataagttagtgtttctttagttttatttgtgattcttaatttatttgtacatttttcttctaatacccaattctatgtttctgatttcgatgtgattttttttcaaaaggacattcattagcagttcctttttttctggaaataacaaataaatgttaaattatttcaatctttccctgagaatatttttattatttcctcattgttagatattagtttagatagctatagaattctgggtggaactctagttattttcccctacatctttgcaaatataacttcagttttgttttttgttttttctggcccttatcgacacttctgagaaaactcttctgacatcaagaggtattattttgtttgttttgatccttttttctatagattctctgttattctctggatgcttttaagatagttttctttatttttggtattctatagtttcactgtggtagtcaacaggcttgtacatttttgtctaaatagctgaggattcacgtattctggaagactggaaatagtgtctctccagcattgtccacattctctcctactgtaaatccttttagaccaaagtctgtccgtctcattcaccctttcaagtctgttaactttatgttaccatataaataccatatatttcttgtccacatatgtagaatatttttgtcactttaaaatgtattttcccaatgtgctgatttcattttcagttttttactagctactctttttagtttttaatttctagaattttatttgctttctttaaaaagtctgttaactttttttcatagtattccctcagattgttattaatgatctcaaattcatggggtttcaattctgattgttgcagagtccactatatcacctaggagatgggtcttgttttttgtttctttagggagaatctttttctgttctggagtgtcagagaatttctgaagattggttttgcatttgcttcttctgttccatgagaatcactagtttgagatcagctttcatgatgatttctcttcatggaggtctcagttcatatgagttaaataaatttgaacttcaagcctcaggaaagcacaggtctattgtttcagattatcagggaaaatgttctcctactcaaagcctaggcaatgagtggtgagcgtgagctttctgccaatctttcaatgctgaataatatttttcttctagttcacgctgctactgaggatacaaccctttgaggatagcaacctcatatgtgagatttcagacttgattccctgtgttacattgcccagtaaatgttctcttctcctcatacagtgcccgaaattaggcactaaagcctaaaccaaatagctctcaaaaccagcctctactttccccagtcacctgcaggatcgtctccaaggtcagctcacttgcttatcttctggttttcattttttcctgatttttacatcaagcggtttctctttcttctgaaatcatgtatactgttaaaagtatttctgttactttttatcaggtatttgaaaggggagagtttagatttaatataccatgtgtgtctagaagaccaaagtattatcattattatcaaacaaaaaaccccaaatttcattgaaaattaaataattatgtaaactgcgaaaatatctgtaaaatgaagctattcgaaagaatattctcttaccactgcaaagtgacgaagcaacttgcacaaacatttttataatactgtcagctgaagaataacaaggttcataaatttggaaaagaaagctttatgttttataaaaggttgcagcctgcagggtggccattctgacaggctgggaagcatggtctcctgccgaaaactggaaacagacactttgatagccagaagaataagacagaaatttatgcagaacagggtggctgaatatacatattcaataagctataggagtcatgaatatttatgaaaggagaaacacgcacatgcgcagttaagcttcatacctctccacaggacccacgttcaaaacatggtggtgttagcatgttgcgagggtggaattttcagccctctgacactgaaaggtgacagaaaaccctcactgcacatcctccatagactggccagaaccactaagcggtcagtggtctctagccaggaaagaatgctggctggttgttttgtctaaaccacaaaaaggagaggcagtgtaagagggttggttgatatcaggggtggagtaagtctttccaaagggctggtttctggttaactcttaggaaagaaaggcagtgagctagggagggggtaccataaggtgtattctaaattccatcccatcattgctaggaactcagttttcaagattgctctggggcccccttggccaggaaggggttcatccagtcagttgagggacttaggatttcattttaatttttcaatataatataaaatgatgcaagtatttacatagtgaccactgggggagggagatagaattaagataaattctaaatttcactttatacagcatgcatcattgatatttaaacagcaaagaacattttaaataataatagaaaaagccatataagtgaaaagcatatgaaactattcccctgagcatattcagacaagaaagatgttagtcttacttctatttcttgcccctgtttatccataataagataaaggtaagacgaataagaaataagaaaatgccattttatttttaatttaaatggagtggttagaatagctgcagcaagggtagtctgcagtttcattggcaacacagaacagctcaatttgcaaagcaagtactcattagcttaatgtaaggccaagctgtgattccagcagagtctgctttagggcaagtcttcggaatacaggaaagcagaggcagtccagctggggaaagtcacgctgcaaaggttgcatttgaaaagtggtgtatatatatataaatcctagtgagaatttaatactctaattagagaacctatttgaaggctccactttgaacttgtaatgttcagttatttaaacatgttattcgatatttatcttcccaactgaaagtaacacctccttccagtgtcctgataatagcatgctattcccattactatagcacttaccaaattttgtattgtaatttaattgtaattcctgtatttctctccactgaagaaaactgcttgatgataaggaccttcacttatttatgttcaaattgccaagaatgactccaaacaaataattgttgaactacaagtagtcctcattcactctttcattcactcattcattttgtacctatattgtaagtgacgactatgtaacaggcacagttctatgggctggtgaaatagccgtgaagaaaacagaccaacagctctgcatgatggagcttacattctacctattccacctgggtgggagagatcatgcatagaaggcaataaatgctttggaaaaaaagcagaagccaggtaagaaatacaggaagtgtggggagatggggtgtaattttaaacaggataaacagggcaggcttcactaagaaggcagagggggtggaccctgtgaatacctaggggaagaacattaagggcacagtgaagggcaaaagtaaaggccctgactcccacagatctgctattccaggttcagaaagaagcccgctgtagccagagcaagagaaatcaggagcaaggagaattgtaggtgatgaagtcaaagttaccaagaagatattatgtatcttgttgaccatgtaaggactttgtcatttacatgggaataaaacactgagtgttcattttcttctaagatcaagtgtataaaataatggtatagtttattttggagtgtggcttgagagaaaacattttgagcagaggagtaactaatttgatttttattttcccaggatcacactctcaaggttgttgaaggagattgcaaggtacaaggacagaagggaaactcgcttggaggctattatatatacataataaataagtaaattacatatatatatatgtatcgcctcccagcaattctatttatataaaatatattttatgtaaataaaatataactcatagggcttatttaatatttaatatataaataatatctatattatatatataaacaatatatctattgtttttgagacaaggtctcacagttagtcactaggctagagtgccacgggacaatcacagctcactgcagcctcaccctcacgggctcaggtaatcctcccacctcagcctccaagtagctaggactacaggtgcatgccaccacactcagcgagtttttggcattttttgtggagacggggcttcgccatcctgcccagtctagtcttgaactcctggactcaagcaatctggcggcctcagcctcccaaaacacaggcatgcaccactgtgcccagccagaggctattatattaacaaaggagagtgatgatggtggcctgggtaaagatcgtagcagtaaaagtagtaacagttcatcagtttctagatagatttgtaagttgcagacaatagaatccattgacaatcggatatagcaggggtaaccaaggagaaaatacagtcatgggttcttagtttctgtttctggttgggccaagaaagggccttccccatccctcttttctgcttatcactagagagagaaactaaaaaccatggcttcaagctgctaaaagcctaaagcaaaaaaaaaaaaaaaaaaacaaaaacaaaaacaaaacaaaaaaaaaaaccaataacaacaacaaaataagacaggttggacaagcttgggatatagtaaaggttgcaaaaaatacgggaaaactgtgaggtgaagagagacagacaaagatgggggacggtagagaaggaaacaacctaactaatcatgttttatttgcaacaagttacttaaggttttgtggggttggaaagacatatattgaatgcctataatatgccataaaatattttcagaattttacctgagttaaatcttttaacatttatatcaactctgcgaggcagatgctgtgattattttcactttgcagattgtgaaacagacacaaagaagttaaggaacatatttagaatctcttagctggtattttgcactgtgaggattcaagcctaaaaaccctacctccagaacctgtacattcgaacattagatgatatctgatattgtttattttcctgaaattatattatttcttttttttttacaaaattagttcactgtaactatagctatgtatacacacacacacacacacacacgcacacacgcgcgcgcgcgtgcctctgagttgaaaacaaagatacaagcgccatctactggcactactaatctcagtctacaattcagcattagtacaaaaatatcatatgtaaagggaagaaatatgttgtgatacatgtgtagggtgggagtagtgatcaaataaatgtgactaaaggttaaataacaaacttttgcaatgcttgcatagtcttcagcttgaacattgccttttttatcctttaccaagtttttctttatccacattcatccattattctttcatttgcttatacattcatgtatgtattatttataagctgtactccacatattttgtgcactcagtactttgctagagctagatgctgaattttgaagaatttgtgagaaagtccatgtcctgatagacttttgggggaaatatgcacatatatttatcatataatgtggtcactgaaatataataaacgcaaagataaagcagtggtggccaggaagtaatcaatttcacttagggatagaagaaggcccatggaagagatgatcattttaatttttctacctttctatcaactgtcaagtgccactatcctgtagagataaaagtatattgaattgatccatttgcattcaaaccttcaacgcattgccacaagatttattttaaaatgcctaaaatgtgccacaggtaccacctatttgctatgttcatcactttggtcgcatataattagtggcttcctatggtgctagctatgtcacctttgtgtgcctgattttcttatctacatagtggaatgaatacagttcctaactcacagggttgttgtaataaattattacagttattctaatattcagaataccatctgacaaatattaagtattcagtaaatgctagttgttatgataatcatcacattcttctgcctggcctactcaactttccattattagggcctcatggtataccctttgcactacaaggacatccaaagtctcttttgaaatattcagatttcaaatcaacccaacatttactgaaggctagctgtatacttcacaggcacgtttcactctacccagaacagtaccttctctgtcctgaaacattatttattgttggtatctcctaagcctttgcctgatcaaatcccactttatctttcaaagctcacctcacaactacgctttccacgaaccttcattttatgaataatatctctaatttatacattcgtacaattctgtaagtttcaaagccttgcccttatattgcctctcttgttggcccttagtaatatatatattatattatatgtattacattatatataatatattatatattatataatgtattatatattatattgaatgtattatatattatatattatattatacattatattatatataattatatataattatgaattatatattttataatatataattataaattatatattatataatatataattatatattataaaatatataattatataatatataattatatattataaaatatataattatataatatataattatatattataaatatatataattatataatatataattatatattataaatatatataattatatataattatacattatatagtatattatatataattatatattataaaatatataatatattataaatatataatattatataatataatatatgatatatcatatattatatattatataatatatgatatatcatatattatatattatatataatatataatatatgatatattatatatgatatatgatatatcatatataatataatatatcatatatgatatatcatatattatatgttatatataatatatgatatatcatatattatattatatatcatatattatatgttatatataatatatgatatatcatatattatattatatgatatatcatatattatacataatttatattatatgttatatataatatattatatatagtattatattatatattatatattatatatcatatattatatatattatatataatatttattatatataaatattatatttatttatatttatatatattatatataaaaataatatatattatatattatatatattatattatatattatatattatatataatatatattatattatatgtaatatgtattatattatatataatagtatatattatatataatgtatatattatatataatagtatatattatattatattatatataatagtatatataatatataatatattatatagtatatatgttatataatatattatatagtatatataatataattaatatatattatattatatattatatagtatatattatatatactatataatatataattttatatatatagtaggtgaccacattgctttttaagtgcatatttcttgttttttgttttgttttgttttgtttttttgagacggagtctccactctgtcacccaggctggaatgcaatggcgggatctcagctcactgcaagctctgcctcccaggttcacgccattctcctgcctcagcctcccaagtagctggaactacaggcacccgccaccatgcccagctaattttttgtatttttagtagagacggggtttcattgtgttagccagtatggtctcgatctcctgacctcctgatcctcctgcctcggcctcccaaagtgctggggttacaggcatgagcaaccatgcccggcccctatttcttgtttttatccatcttggtgatgtttggctggagtaaagggacaaacacctggcctccaaacaggagactctattaattttgaataattttacaaactcttcctcttacctaggattctcatgtcacctctatcctcaggcttattaaaaaatcattcctctagggcaccaatattaatgatgaagttcatattttttctaaggtacactagcgtggaaaaaatgctaaaactactaaattacctgataaataacttgaaaccagtgatctagtggtatggcatataaatttgaaagtagtgaataaattgaagactttgaaaatacattatagatgccaaaataacattttaaaattaaaaattcacaatattgagtacaatttctataaaataaactttatttatgttaatacagtttgaacacaacacaatcaaggtatagatcatttctttatatttttttttcttttttgatacagagtcttgctctgtctcccaggctggagtgcagtggcatgatctcggctcactgcaacctccgccacccaggttccagtgatcctcctgactcagcctcccgagtagctgggattacaggcgcctgccaccacccctggctaattgttatatttttagtagagacagggtttcagcatcttggccaggctggtgttgaactcctgacctgactctacctgtctcagcctcccaaagtcttgggattacaggcgtaagccaccacgcccggccagtatagagcatttctaatacctccagactttgtgtctgctcctttgcagcccatctcctgacatcctcctgctgaaagaaaccactgatctgctttctacttgtccttatagatgaatttttgctatttctagaatttaatataaatgtaatcatgtcatatgtgctcttttatgtctagattcattttctcagaataatgtttttaaggttcacttgtgaagctatgtgtattcttttattgctatttttctagtgcatatatataccaatatttgtttattcattcacctgttgatggacattcattttcaatttgggattattatgaataaatgtgctataaatattcctgttctttgggtttataaatgttcatttttgttggttaataggaatgcatttgatggattgtttttaaatatatgtttaaactcatgagaaactacaaaagagtttgctaacgtggttgcaatatattacattctgatcagtgatgacagttccaaatgatccacatcctcaccaacacctggtattatcagtcttttaattttagctgctctagagaatatgtggtggtatctcatgatggttctaatttccattagtgtcatgaccaatgttttaagcatgaaaacatttaaacattccacaggcttattcccagtttgtaagttttatttggtgaagttctagttgaaaggtcttgtccatgttttcatcagaatgtcttaactgggttttaagagattcttgtatcttctgggcacaaatcttttgtcaaatatgtgaagtgacaactgtggttctcttttactttcttcaaagttccttacaaaaatttaaggtttttatttcaaagaagttaaattcatcattttttcatatattgtttattcttttatgtatcatgtaagaattttttgtctacaccaagtggcaaagatttgttctggtactttcttctagaagatttagttttggcttttctttttaagtatatagctctagtacaaattgaaatagaatatatcagtaagagcagacatccttgccttgttctcaatcttagaggataagcatttagtttttcactggtatcctcttccctgtagaaattttgtaaatgccctctatcagtttgagaaagattccttctttctttgctaagaatttttttattatgattatgtgctaaatattctcaaatgcttttgctacattagttggtttagatatgtgtcctctccaaatgtcatgttgaaatgtgatctccagtgctggaggtgggcctgaagataggtgtttgggtcgtgggagcggattcctcatgaagagctctttccatgagtaatatgttccccttaaagagcctggcagctcctccctccagctcttgctccccctttgccttctgccatgattgtaagcttcttgaagcctcatgagaagcagatactggtgccatgcttcttgtacagcttgcagaaccatgagacaattaaacctctttgtaaattacccagccacaggtttttctttatggcaacacaaagtggactaacacgctacttctattgatatcatcatatagctttcctccttatactgctaaaatggaaatttacattgattaattttcaaatgcaaaccaaccttgcattcctgggataaaccctacttgctcgttaggtgtcattctttttctgtgttactagatgtgctttataaatatttgaatacacatgtttgtgtctaggtttataagggatatcagtgtgcaattttcttatgaagtttttattttaatttttgtattacagcaatactggccagataaggtaaattgagaaatcttctatcatccactaatttcttcaatattttgtataggatttactttaccccttccataagggcttgatagattacattagtgattccacctgggtctagagataggcgggagcattaactacaaattcaatttctttaattaacattgggaaatctaaattttctatttatgcttgagcctattttggtaatttgtatttgtcatggaatttgtccatttcaactaaattttaaaatatagtggcagaaatttgtttataatagtctctttttaccccttagtgtctacagtatacatacacataactcttacacttccaatattggtattttgtattttctctcttgttataatgcttttatctactaaaaaagaaaatccacagtgtatgaaaggtggtgttggattatgccaaataataaaatgaaaattaggactattttgtagttatttcaatgtggaatcttttacttgaattccagtattgaaccacctcagaaccaaagtattgcatgtttttaagtaaaactgaatatgctttacacagtttagtgagagaccattttaaacaccgttcagatttcttggtaaccctacagaaaataaattgagtatatatatattttttccctcaaatgttattttaagttcagggatacgtgtgcagaatatgcaggtttatttcacaggtaaacatgtgccatggtggtttgttgcacctatcaacctataacctagatattaagcccattatccattagctattcttcctgatgttctccctccctgcttgcccccgcccccaacaggcccagtgtgtgttgttctcctccatgtgtccatgtgttctcatcattcagctcctacttgtaagtgaaacatacagtgtttgattttctgttcttgtgttactttgcagaggataatggcttccaactatccatgtccctgaaaaggacataatctcatccctttttaatagctgcatagtattccatggcatatatgtaccacattttctttatccagtctatcattgggcatttaggctgattatgtatctttgctattgtgaatagtgctgcgatgaacatacacatgcatgtatctttataatattaatataatggtttttattcctttgggcatatagccagtaatgagattgctgggtcaaatagtatttctgcctctaggtctttgaggaatcaccacactgtcttccacaacggttgaactgatttacactcccagagtgtaaaaatgttcctttttgtccacaacctcaccaacatctgtggtttcttgactttttagtaatcacccttctgactggggtgaaacaatatctcactgtggttttgatttgtatttctctaataatcagtgatgttaagcttctttccatgtgtttgttggctgcacgtctgtcttcttttgagaagtgtctgttcatatttttcccactttttaatggggttgtttgtttcctgtaaatttgcttaagttcttcttagactcactctggttattagacctttgtcccatggatagattgcaaaaactttctcccattctataggctgtctgttcactctgatgatagtttcttttgctgtgcagaggctctttagtttaattagattccatttgtcaatttttgcttttgttgcagttgcttttggagttttcatcatgaaatatttgcctgtgcctatgtcctcaatggtattgcctagattttcttctaggttttttatagttttgggttttacatttaagtctttaattcatcttgagttaatttttgtatatggcataaggaaggtatacagtttcagttttctgcatataactagacacttctcccagcaccatttattaaatagagaatcttttccccattgcttatttttgtcaggtttgtcaaagatcagatggttgtagctatgtggtcttatttctgagttttctattctgttccattggtctgtgtgtctgttcttgtaccagtaccatgctgttttgattactgtagccttgtattatagtttgcagttgggtagtgtgatgcgtccagctttgttctttttgcttaggattgacttggctattcaggctctttttttggttccatatgaattttaaaatagttttttttctaattctgtgaagaacattaatgggagtttaatggggatagcattgaatctataaattactttgaacaatatggccattttcatgatattgattcttcctatccatgaacatggaatgttcttccatgtgtttgtgtcatctctgatttctttgagcagtggtttgtagctctccttgaagaggtccttcaattcccttgttagctgtatccctaggtattttattccttttgtagcaattgtgaattggaagtcattcatgatttggctcttggcttgcctgtttgttgttgtataggaagagcatatatatatttttaattccactttacatttgtaaaataaaatgcaaaatatttttatgtctgttttcatagcacatttagtatgcatgtatttctctttaagtgtttgactttcaatatttaaaataatattgcttgttatttgaagaaagttctaagactacttaattaatttacataagctgtttggcaatagtataaccagggacttctgctaaaagagactgttgcaatgataaaataaaataaagtgcatattttctttaaggagtaatgtttcagtaattccacaagaaaactaaagacccccaattaaatgtttttaagtttaacttttacatattttcataatgagatcaaaagaggagttggagtttagggtcagaaaaagaaaatcattctatgttcaaatgtctacaatgtgcatatgctatgtcatgcaggggtgagatcaaatcaacaattttcaagttcatcatctcatgtaatgcatacatatacatgtgaatcagacttgttatgctgttattattaaatgacatggaaaagaaaatattaaaagactttctgcaattatctcatttctcttgcaaatttggtaacatataataaatatatgtactttttcctccacaggacctgattggggatatgagggagcagctttcggatcacttcaaagatgtgatggctggcctcatgtacccaccaccactgtatgatgctcatgagctctggcatgccatgaaggtagtgatctgatccaaaaatatgcctgtaacaagtacaggccagtatttcagtagaggggaaactgccctgtgatgctcctacatacttatatgatcaaggagaggggagggaatatctaaacaatgatgtaacaatggaaatgttgtggtcaagggcagtggccttgttaggaaggtggagcctcctgggctgagtggctgggatcagcctgttcttttgttgtacaaagtcacaaacttactgagccagccccagtgctgacctacaacaaggaaaagtgaacaagcctccagggctattcagatttgtccctgagcatgtattcctatattgaggataatgtattaaaaatgatgtgaatcttgttacattatttgtaaaaatttgattaagtcaaaagaagatattgaatcagggacaatatatagatgatgtctttatattttctttttatgacctgaagttcattctttacagaaacatttttttttttgctcaaatgtataaaaatcttaatttggaagaattagaatcagtgtttcttacaggaaagtcatttccatgaaataagttgactgtggatttgttacagattttgttggctaggtacagggaacaaagagggccttggctttacttctttccaaatgcagatattaaacacctgcagaactgttgaaatcattccagtacgatgcttgccaatgaccagattaccacaatctgtgaacaatgtgtgacagaaaagaggcaacaggaaaaaaattaaaggacatggattttggccatcacatttactgatccaaataggcattgtacaaaaattatatgaattttaactaatcgcttttaacacatgttacatgtcaattcctacctcttgcaaaattatgtctaaaaattatttaaaaaataaagttatatgtttatatgttgctgttttgattaaacaagtgtgttttatcaataattcatagaatgctaaggatttctgaggctttcctaaaaaaggtgtattgtctttaagatctctttcacagaccaatatatccatgtgtctgcaagagaccacagaaagcatccatccaaatatttatgcaaattgtacaaaattccacatctagagaggcaggcacaggtccctaaaatattctcggcaaattagaaaacctgtattctaatgtcagcttgctaaagaattaatattccagcagcaaatggaatatcaaatatcattccaacagcaaatggaaatgctcaatgccatgagcattgcttgaacatgtctttctccacattgtttagaaatgctcatactgttttattctaaatgaagaaacagtttccttcagataatattaattcttcagggtcaaataggtagtaaatggcaaagctgaaactaagattgtgcctgccttcatcctaaaccacttcctttccctgccacctctcaaaacactggaaatgctgtatccctttcttgtacaaaaggtacactattacttccaataaaaatatccttacatttatctcttttttcctttctctagggagtaggcactgatgagaattgcctcattgaaatactagcttcaagaacaaatggagaaattttccagatgcgagaagcctactgcttgcgtaaggaaatatacatatgtgaatatattttacacatataagaactttataacacattaaatattccagtttatgtattttgaagaattatctaagacattcttacatttaacataggattcactgaggaccaattaactcattaggtaaaaccgattattagtgcactaaaaatgaaaccattctctagacaatcaagttaagcaaattttccaggaaaataattacaagtctctatgaggtgaatgttttcattaagacaggaaagtgtcccacattttaattcagggggcatttcacctcttacccaggaaagacccagcatatagaaaaaataaggtacaataatggctcagtgaattctacaaatatatctgcttcgctttacataaatttcacattcccgtaatctactacaaaatcagatttttatacatttcaaaagtagaaagggtaactattttcactttcaaaaaggtataatgccttaagttctattgcgttatgtagtatatgacattgtgtgtcaagaaaatgttgcggacagtcatctctattgcattcaaacaaaaacaagacttttctgaagggaatgaagtcagaactttcactaaaatgttaaaatgagatgaagcacttagaaaaagtattgggctgggcagcattctgtggaaatagaatgcataattctgaattttgagaatcagagaatgtgaaatgactctcaatcctgtttttcaattttggactaaagatttttaaaaaatagtcctgtgcttatgttaccattaggtgacagaattctttggcagacggtttattgacaaagaaatgtcaacaggtggactacatttcctggactttgtactcacaactgggaaataacattaacttactcaaaacacactgatacatagttctataataaatcatacctttaacatgttttcttatacagaatacagcaataacctccaagaggacatttattcagagacctcaggacacttcagagatactctcatgaacttggtccaggtatggcattccaaaatttacattactttgcactatctaagcaaataagtatatgtcattgccaaaaaaaaaaaaaaaaatagaacagaaaactccagtatattacagttcaatagtaaattctgtgtagtaacatttactgaagccatgttcaaaatactcaactagaaatttaagttgttaaagacaaatatggataatgcctcaactctattttcaaaaaattaaaaatctattctaaagagattataaatatacatgtatgtataattaattttatattctgagaaaattaaaagattaaaaatattacagttaaaattaataattctaattagaaataatttctttctttctttctttcttttttgagacagtctcgctctatcacccaggctggagtgcagtggcatgatctcagctcactgcaacctcctcctcctgggttcaagtgattttcctgcctcagcctcccatgtagctgggactcaaggcacgtgccaccacatccagctaatttttgtatttttagtagagatggggtttcaccatgttggcaaggctggtctcaaactcctgacttcaggtgatccgcctgcctcagcctcccaaggtgctagaattacaggcgtgagccaccatgcccagccttagaaataatttcatttttaaaactgctacatgggcttagcgcacactaacatttctgagctcctacaatgtgcctagtactgtgtgaggagagaaacaattttctcatttaataacaacaaaacactataatacaaatattctcataagtacttcagaaaagaatagagaatcacaaagtataaagttctagctctatgattgtctgaagagctaataagtagaaatccagaatttgattgaatgctagagactctaaatgccagcatatgatctttgatgcagcctataaaaattctgtggtgttatatattaccaaaaaggaacactacttcaagttaaaaatagattttatcatttatgtttctgtactggctaaatgatatataagtatttccatttaatgaatatttcttgaaaatattccacatattagcattgtaatacaaataatatttttaaagatataattatctcctgttttatacatattctccaatgtgcctgttatcctatttaacaaaggcactcaggaatgcaaagagaaagagggtcagtgttcagctcttaatttctaaaagagaatctcaaaggccacagctgagaaacatgtcttaaaagccagaattttggtttggtttggttttgtgtttcgtgtgtgtgtgtgtgtgtgtgtgtgtgtgtgtgtgtgtgtgtgtgtgtgtttgaaatgaagcaagagtttctaaacctccaaacctttcctttacacatcaaaggcatagtagttagcaaagaattagtagtcaccaaagaatttcactaaaaccaagaagttgatagaattttgtacatgggaacatgacattagaaaagatttcaatgccttttaaaaaaagaatacatgaaagcctttttagtgggaacaaagctggaagagtaggacctaggagagagaaggatctatagtccaggtggaggggactagagtgagaatcctgcctaaggccctcaggaacacagagccccacactcttaggtgaggagttagaatcaccagataaaaacgcaaggtagataattgtctattctttcatccttttctctgaacccctccagtcccaattgcttccatgagttattggatttgtttttaatctaaacgtttctgtggctactgtggataaactctgagaagtcctcccctgtcctttatcctgcttggctttatctgaagaggtgctatggagaacagacagtcctcagtccctgaatttttatggtctgacttatctacttcatggtacctttctactttatgatggtgcaaaactgctgcaattttcacataatagttgatattccataaattatgtgagatatgtaacacactttattgtaaaataggctttgtgttagataattttgcccaactgtaggctactgcaagtgttctgagcacatttaaggtatgtgttcaataggttaggtgtattaaatgcatttttgacttgggatattttaatttacaatggatttatcaggacgtaaccccatcataagttgagaagcctctctatatccttgtaccactttcatagcagctcaactttggcaaatttagagtcctcatattttgtttatagcacacgttatcaatatttctttaatcttagtttgtaatgtctttgaaaatgaggatctctaaaaacttagaagagttgtgatctacttgcttttggttaggtccatttaccacttaaccgcatgcaaagttctttcctagatatatttctccggtatgactttctttgcatccttgctccctcatttatgccttttttattttcacgactcaaaaacatttccttgaaggatctcttagaaggtaaaactggccgggtattactagagggctgagtcataacaaacccttacttttcaaagcctcttcaagtctcagcttacattgcttggaatcagtaagtggtttctctttgtaactcttcaaggcaccaaatttctaaactttctctcttctcccttgtatgtctgcttgcaaactagcaagttatttactgagcttatctctttcttgtaatagatgactaaaagcataaagtaaatgccatttctcaagctcacaggaagacctgaacaggtgctaccgatcagagtgcatttcccttccaagaagtgatccagagacttagtctccttccaccgttacaactggcttttaagtttatcatgtctgtcttcaacccagggaagcagaaagagaatagaggtttcttcacagaagtgttcatgagccttgttgcaatgcatatccatttctgctcagatatcactggctaaaccctcactcaaggaggcctacttaatatcaaaggtagtgaagttatttgtcttcaaggaagttgaaacaagttttaaatctgtatttagtgtatttcttcttcttcttcttcttttttttaacggagtttcactcttgtcacccaggctggagtgcaatggtgcaatcttggctcactgcaacctctgcctccctggttcaagtgattctcctacctcagcctcccgagtagctgggattacaggcacgtgccaccaagcccagctaatattttttatttttagtagagacgcggtttcaccatgttggccaggatggtctcaatctcttgacctcttgatccgcccgcctcggcctcccaaagtgctgggattacaggcgtgagccaccgcgcctggccaatcagtgtatttcaaagctgtgaaaaagaattgaacattgcaaccaagaaatacaaatgggtaacagaagatggtaaagacatgtttgtcaataaatagaaaacttatgatgatgactatattaggcccaaatagaatttctaaaagggaagcatatataaacaaagaatttgctttgttgtgtttggttttggtttggtttagtttaatttggatatctgtggtttggctacatagttcataaaactcccatgtcaccactctcagtaaatcatcctattctgaggattttcatctgtaggattatccatgtcagtggagaaaagataatttggtttttcatagtacaaactgaagcgtctggtaaaatgtaggtataagctcattttaatttgtaacagaagttgaggtcatttgcagaaaaatacattttcaataataattactattttaaaataatctcgattgacaagatgccaattgaatattttcttttacattttataagattaattttaattaaaattttttctcaatttaaaaggtaattttacaataatgttgctacaataatataaattaaagcaacagtttccactcagagattcttcttggcacaggtattgcccctaacagagtgaagccaacagttccattataagccattataaatcctaatatcaaacaagtttttattgctttagtaggaagaaaattattttcctaaggactttatttaattccattaggactgcatcacagccaaatcctgcttctgttccctccctcccataggtgttgatcccaagaacattccataattaacaggctggatgccgatctccgtctcaaagtcatcttcccaggaaacccaactggcaatatcccctctgtgtagagatgaggagacttaagcttagagaggttaagtggtgtacctgacattacaggtctacttaatgaaagggctgacatgaagtcaggcctagatgcactatacctctgctgttgaattgtactgctcctatctccaaccccatttggttccactccaattctacttctatttggtaaaatgtcaacgatcaaaactcaaatcctcttagcatttctgcacctctttaaaggttgagctataaaccacctaaaataactgacatctaagaattaggatcacagtgtatttttataaagtaagcattcttgtatttcaagggaaaacacaagttccgaaaatgaaacatgagggaaaataaatcacaagtgaaaaaataatcaatgaatggtgacttttggatgtaatagggcaatcaattttattcccaattgtagttatttttttcctaaaattaaacaatgatgctttattaatgatagggtgtgtacatgagtacgagtatttgtatatataatatcgtttgtgtagatatacatatattttaaaataacacacaatattttatcactggtttttacctaatttagattatgaatgaacaggatgaactattacttttttttaaagataacatcaacttgaatttttaatttgattttccttcttatatatgtcattaaaattttcaaaaaatgtagcacctataaatttctagaattacatgtaggaatagttcagatttttattgcttccacacacaactttatttcctagttttatcttaacagaaaaagctaatcctgtatactgcagacaggacagaatcaacattctattgcttgtgttttaagtttagagttttaggcttttggctcctaataggcataaaggtcttctccaaaccatgattcaggacccaagactcttttccgtttgtggttccaccaaaagtgttacttcttaagtttgatttctagaattggaacattaaatatatgtatgagtatttaaccttggaacagcacttaagtatagtaaaattttcctttcaacatagaataccaaaaagtgtgggtgaatcaaggcttacattttataagaagccaaggaaaattaataaagtttactttaacattatatacttacaaagtttcacagtacattttccttaaaatataaaatacacaaaaatacaataatacatatttcataaagattatttaactcataatagaaaatggaggtaccaaactattaaaaacttaatataatctcctttaataatagtctcttcgaaaatcagaagttccgtgataatttatactgttagtaaaatgtatgagttctcttagattgttaaatagttcaaagattttctattggcttctcacttctacattaatggcttctcagtttggaaccactgacttaggatttggatcagtaaattcagaaaattggaaaagatataaagtgaataatgggattgtaaaagtccatcacttctcttgatcattgtctgtggtgtacacaatttcagagagaatctgtcaagatattttacaaaaagaaatggagttttcttctaaagggaggtgaaatttggagctggtgagttcctagtgggtaactgtggggcaccatagtgtaatcaaatctctcccatcagttttgtatctttggatttatcatttaacctttatgagattcaggtttttactctgtaaattaaaggatatgagctcatccttctttcaattcctttccaaaacaaatattctccaattctttggttgttataatcaggtcctctacctccctatgcatcttcacttttagaatcaaaggaaagatgacccatggttttcatatttttaacatcactaaaattcagacacacccattttttttgaattaatagagactggggtaattggagcataggagccttaggttcttgtgaaatggcaagtgttaaaaatcattgtcatattttccagaagacaagatcatttactttatctataaagtgtttcctgacaggatgatttctaataaggaaacaactgagctggaacacattcttcttgaaaactaatgccaattattaaactggctcacaatgcttcctgcatgcttttattacacagatttatgaaagatctaattatctgtcaaataatgaaaaattagtcacttagagattaattaatcaatatgtgcaaatcacactggagatgataaacgttttcaggaagagaaagaatggaaactacctaatggatacttactgcttaccttggctttcagaattctcttatgacagtttcttgaacccgtacaatgaggcctctgggagtgttatggccaacagctttcaataatcatctgtaatcaattcatcgcctccaaatattttcacccacatcttagttcttttcatttctttccttcccatgtttatcatgcccttaaactaaattctgtactcatttatgccattttctggtacttacatcaattaaacataccatgtggccgtctcaggccctttacatgacaaagccagcttgactctgcctttgtcaaagccaaatcacaatcttacttattcacattgtttaaatccaccagtgtgcttaaagtgctcttggtaattagctgcataggaaaataaacagataggcaccatttcaggttaaatgtccaaaacaattatctttccaaacaatatttcagatatgtaaagttgcagaaaattcttaaatatctctcacaaactttgcaaaggcaggagcttacttagctatagaagctgaagatcactaagaaaatatcaataatccagaaaatcttcccacatccactgatgcatctttgaagtctgctatctaaagttatttctttacttttccaattaacatttcttgaatgcctaccatgtgccaagcatgattttagataattgggaattattggtgtacagaagagataaagatcccagccagcccttaagatgcttacattctagcaagagaatatggacaattaaacataaatttaataaataggtggattatataaaatattagaaggttgatgaaagatatggcagaacagagtaacagggagaagcattgtagggctgagcataatgggtatgttgccattttttttttttttttttttgagacagagttttgctcttgtcacccaggctggagtgcaatggcacaatctcggctcactgcaacctccacctcctgggttcaagcgattctcctgcctcagcctcccaagtagctaggattacagatgcctgtcaccacgcctggctaatttttgtatttttagtagagacggggcttcaccatattggccaggcttgtcttgaactcctgacctgaggaggtccacctgcctcagcctcccaaagtgttgggattacaggcatgagccactgtgcccctcctgccatattatatagattggtcagagtaggcctcattgagaagatgagatttgagcaaaaatatggataaaagaatgagttaacaaataaatcaatgtgataggatgttccaagtaaagggtatagctagagaaaaatgtaaggtaagaaaagctaatgggtatgagggatagacacaaggccagttggtagcctctgagcaagcaaaggaaatgtactataatagtaaatgaattcagagaagtagcacgtggtaagattatgtcaaatcctgaagccattttaaggactttggcttttcctttgagtgaaatggatgagaggtaagtcattgctgggtctttagtgaaggaacgtggttttatgctttaaaatattcacaatagctgctatattgagaaaagactacagggagccaaaggtagaaacagaagcctgtaaggaggctgcttcagcagtaaagctagctgtaatgttacctcggacccataggagagcattggcagtggtgataagtgcccagtttctggatgtattttagatagcagcaggagacagacaaatctttaggcagacagggatggtaaaacccaaccttcacaccaaagacagtttaaagctgaaaacccatctacaagtctcagataaatccacagaccggattgggaacccctcttcccatgtgaggtgctttcctctggttgatccccagccttcacctattttacacattcctacccttccctaattggttttttacactgttgcgcccatctttgagtggtgccttttttttagcctttttgcgtcctaacaaaccaatcagcacatacccccccattctgagcccataaaaacgctggactcagtcagagcaggggattgcccaccttcgggtggtgggggaggaactacctgactttgggtaagggggctgcccaacttgggtctccctctttgctgagagctgtttcttcactcactaaaacccttcaccttgctcacccactgactgtcagtgtaacctcattctccttggatgtgggacaaaaacttgggacctgccaaacagtgagtgtgaatagagctgtagccctgtagcactcccttcccactcaccaagcaacaggaaaagtagctgcttggctccacatgccccctttagtcaggctgtcgatggtggaactaaaagagctgttaacacacccctattcacctggagtctccaagttttcaggcaccaccatgtcccctttgtctggacattggagtcacttgtgacatgcctggtccagccacaagccccacatggagcccgcacctatgccagcaattggaacagccagctggaccccatgctcactcgctcacacatcccctcactctgcgggctgagtgcgcagtcacagtggccacaggatccaggccaggtggcaaggcaaatgcagcccaacaggctgaatgggcagggtacctcctgccacaagcccagggcgagcaaggcccaggcaggagcattgccagccacagaggtctccaactggcaaaacgcacagaaaaaaaatcctgtgtcattttgaaggcagtgtctatattatttcctgaggaactggatgtgggctatgaaaaggccgaagaaaaacggaatcaaatgtgactctcagtttcttagtctgagcaacagaaaggatgaagtgcagtgtggaagactgagactatagaaagagtttgaggtggagggagtcgaggcattgaattttcaacatgctaaacctgatatgtatattagaaaatcaagtggagatgctgaattggcaattggaatatacatatctgaagttcagatgacagatctttgctagagatgtaaataaataaatgggtaagacaaatgggtatcattacaatatagatggaatttaaagccacatgagtagataacattatcaagagaagaaatgtaaatacagacaaaaagatgatcaaagactgactacttggaccttccaaaattaagagatcgaaaagaagagaaaccagttcacaagactgaggagtaaccaataaaatgaaatagattgcaggatcctggaagccaagtgatgaaagtatagcaagaagaagagagtgtcgattataccaaatcctactgatcgattcaataagatgaagactaagaattaccacaaatgtatgttattaaataaatggcatgtagtcacagaagatatagcatattaattgcttccaattatttgtttcttggtattaattaaaatcataagagagaatttgaaagggagccagaacatattgtgtaaaaataagttatttaggctaagggaagagtatggtaaccagacctcagagtcagaaatgccactgatatttcatacacattcttctctaacaatcagaccttgggcaattcacttaatatctctaatttttatctccaaaatatgaggtgggactcctaaggtacctgcacctcaacatttccatgatttgaagataacacccatagtcctaccactcaataacattattcactcctttattttaatacacagatttcaaaataagaattgcatatgtgcagtcttagtctcttggtattttaagcaaaggaaattgagcaagaagaaatgtgactgacaaactcatgcctatttcccatcagttgttcacctttaggggacatacaacttttgagttatgattaaacattaaatgttccagggctacacatttatgcaaaaatggtagcttacttatttctttgtgaataaattgcactttctcatatgcctctagctttttgttatcaagaaaaacagccctaatatttaatctaaaatggcaaatttcatctgtgtgatactttgaatagtgaatgtgggtgcacgttcaatgtcatcatacttttattgggttaagtatttgactctcagatttctggccatcctcctcctttctttccaagaaggcaattggtagagagatgtgtgtgtgtgtggttaatgaactaccttggcaacaggaaggtcaccactgtgtccttagatcaagatattgcctgcattttggctgatcttgactatggaatagcaattcttggcaattctggacattgaatatatgaggtgtcaatgaccagcatatgggcatttatcagtgttagctgccaagataagccactgatttaatttatgatcttttctctgtcttacttaggtcagagccaaactgaccagtttggtcagagaaacctttcatgatgatttagcctcacctttactctcacgggagctgaagactcccccaaaggtctagctgtgtctcccacatagttcaaatcaatgtggtctatcctgtagcccttggctgctggaacactgtccctgccatggtcataaacaactcaatctggcaagcttccccacaggttctcagctagattgcaagttcctccatcaggaaccggtaagaaatttgggatcccattcatactatttagggactgaggtttattcaaggaagttgtgtttaagacctctctgtgccctcttgctgtctcactggattcactgcactgtggctattcccagtatcctaaaagatgacaggactaggcacagtggctcatgcctgtaaccccaacattttgagaggctgagacggaagaatcacttgaggccaggagttcaagaccagccttgtcaacatggcgagatcctctttttgagaaaaaaaaaaaattagccacgcatagtggcacacgcctgcagtccaagctactcgggaggctgaggcaggaggattgcttgagtccaggaggtcaaggttacagtgaactatgatcatgccactgcattctaacctgtggaatggagcaaggccctgtctcaaaaaaagaaaaatggtagaagcagaagctactgtactttcagtgttctcttaacatagttggagcaaggagaaagcctcccctccatatcttgacccaaaagaaacagttaattagactgataacatgcctccctacctccttctccccactggccctcataaccctcaggaatcaatggaccctgcattggttagcgccccttccctcctgtttgaaatgatcaactggaccatgtctgttctctaaatgataatggagtgagagttaaacagatttacaaaatattctcactgcacaaagtctgagcttcattactattttgttgttgtataaatcctattgtgcaagtcagagatggactttctctgcatttttgctctaacaatgttaacactcatttctaacacccactgccatggtcaggcagtggatactcagtttgataagggagaagatactgcacagagacttggaaaactgaaaaatgcctaaatgtctttcaaacattaccagtgctgcaaagaaaaggtaaaataaaataatgcacattttaagacaaaaccttatacactatcttctaaagtattcatgaaatcaggaaatgaacacttactccagataataaaagaagttccttaggaacaatcagaatgtttttcaaggatttcagtctcactaatccaatatgagttgctgactaagaacatttacatggaaaacctgtgcttactttacaggggaccagagaggaaggatatacagaccctgcgatggctgctcaggatgcaatggtaactagaaccagttctcagactgactgcaaagaacctgggttaaaatgggctggagtggttctgatgctacttctctgctggctaatgttccaggtcctatgggaagcctgtcagcagaagacgggggagcacaaaaccatgctgcaaatgatcctgtgcaacaagagctaccagcagctgcggctgggtaattattaactgggtttcgttccagctacttgaccaattatataacaaaaagaaggtggttaactagaaacaaaaatgaaatattacaaggaaatagcggaaagtcagttatctcaaaggtacttattttgaattttgtttataagatgtgccttatttaatgacattactaaggaataaatatttccttaatattttttccaataactttcaaaaactgagcattttaaaaataatctctgtatttgatggagtacttattcaaatatattagctgtttcctattaggtatattatatgttgtcttgcaaaatgcatagtaaatatagtttaaccagtcaatactgcatcaaggccattagtattgatgtcatgatttctgcaatatcgacggaatcttattggtcttagagggtgcactcatgttagtttgccctttgtttgacattccctaaactacagtgtctttttcttttattaaaaaaaattttgtttttttctatataaagtacgcaaatggctgaaaattttcaacagatggcctaccctaccccaatcccacatctagactttacaagtcaataagagacattacctgtcttaatgataatcataataataataatgaaaagacatcttcttgcttctaattttcagtaagaatggatgagaactaaagttgcctggggtagtcagataactaagttcgtgaaataaagaatcttaatttaacacaattctaaattagtaaaccctagtctacacccaaaaagttgatttcatatttctcagaatattctttatagatactttgctattttaatcatcacagagaggacttttacacttaattctcatatttaagctctagtaggaagtttgctgctgacataagcctattatatatgtcctaaataactggtccataaataatggcttgttgtgtgcttcctctcaatttaaatcagcagtgagttagtgggtcccactggaggtggcatttgttccccaggagaagagaataataacaggtctttgaagttcaagatttatgctgactctactaagagtatttgtatttgtttcaatggtatttatagcaaacagaattgataacagtagtacttttaattattttatggaaaatatggatttttactatgtgtaacaatctaatatttgtattataatattttcaaaatctcctttgaattacatcaatttgttaaagttttccaggaatttcaaaatatttctgggcaagatatggtagatgccattaatgaatgttatgatggatactttcaggagctgctggttgcaattggtaagtaataaattatttgaagcacaacagacattttatttctctataaatgctgagtggctctgattgaactaaagatgcatgagtaagctcttgatcgagtcattttcccttgaatttaattttttaaaaggacattaactccataggggaagagtacatcagctactgataaaatgcactaaactggcaacctgataactttaatgaactgatacccttccctaacagctagttcaactttcataccagaaaacacatcattctcagatattttctctttgaattggcttctcacactgttcaatccattttatctttactgacttccattcccttgtccaagagccgataaatacttaacagtatggttttcttctctttaggaggaaaaggatattttagtgaccattactaataaattttggtttaggagtaaatcctaccataaaagagatttaccaagtagtgattttcctcaggctattgtgatagtggcacacctcttgctccttcctaagtaagaaatgatatccctccatagaggacaaaacggggcgagttatccagaaaaactgcaatagaactacctgtgcaatagaactacctttgtcttgtactgtgctggtgaattgacagcacacatttcagggacgaccaaaggggatcattatgaaatatctccatcgaaggcgtagtcaagtaatcacttagatactagttgaataaatgaatattgtgattttccatccttgaatggcagaggcatacacgggcgtgagagctgacagataaaggaatttttgtagcttatctagtaaagaagtctcaagctaggcttccatgaaaacagtttgatgaaacccctaaaatagtatgcaatagatgactattaataactgtgtattttttctgaaaatgttacatttattccagaaaattctctacaaaatttaataaccatatattacatcaaaatccttcattttataaacaatgcctaaggaaactaagtaactgcctccaagcctatcagctgattagcagcaaagttatgactaaaattcataatatccgaatctcaagatagctttctttccactatagacccctgccacaaagcagtgggcataagagaggaagtggtggacattagaaatggcagaaaacatttcaactgatttattcactcagcagacatttattcagcacctactgttctagacactgacttaggcactgcagatagaacaatgaaacaacaaaaacagcaaaagttcactgccttcaaggagcttttaaggagtagtgactcaagagtgattatgaagatttcgtgtattaaaaatgaaagaaaagatgagggtataatctcacaatctaaaataattacttaaactaccagggaaatactgttatgattatttcattctggctagaaattatagcctctcatacattacctattcatgtattaatttgttaacctcttcaaataaacactactgaatgtttatgatcatcaactgacttccagcaaggtaactgttgaccaggctctaggctgtcctaccaccttagcagtttttattagataacttctagaactagtctagaccagttgtggtccatagtttccccttaagagatttcaggtctactcacaaatctataagttactaaaaatagcattcaaatagatgaacagattacatgggagctatatcaaattcaatcctacaataataataataatctataatagtgttaataacctaggtctctttgaagctctattaatttaatattcagataaagatgataaagttttcactttgggaggcagaggcgggcggatcatgaggtcaggagatcgagaccatcctggctaacacagtgaaaccccgtctctactaaaaatacaaaaagttagccgggcgtggtggcgggcgcctgtagtcccagctactcgggaggctgaggcaggagaatggcgtgaacccgggaggcggagcttgcagtgagccgagattacgccactggactccagcctgggcgacagaacgagactccgtctcaaaaaaaaaaaaaaaaagaagatgataaagttttcttcattaggctacatgaaggaactaacaagagttccaacagatagaaatagaccaagtgaaaatctgcatgactcattataatgttgttgctttatatttttttcctgtggcttatagtgttaccattattctaagtgttgaccttacaatacaatgtaagaattgtaacaggaaaagtgttattgtttctcaaattctgacgaaaatatatgttttcactctcaatgtttcttcttctctctctgatttctcctagttctctgtgttcgagacaaaccagcctattttgcttatagattatatagtgcaattcatgtaagtaagacatatatttttaaaatttctccagaaattgtgtctgttttctcaaaggattaattttacttccatcatttaaatgttcattaccatttttgaacttgtatgtacaaagaaaatacacccaagtgagaaaaactggtttagacaccaaaaataagacatatcagataaaaataatgttctgctttctgtatcaaatttagggaaccatatttggggtgtatctccctgtgcactttagagattatttaatatctgcagaaactggtaaattcaaatgtttttgtatgtttccaaagacccccacatcagacttatgcaagtacaaaacatatggcattaagcagaaaatgtcaaaatattacaaactctcagcaagcaattgccacgttcgtgaagtttcaatacacgaaattatgtcaatggatatttttgaacattgtgctattttcaaaaagtatttaaagtgataactagaaaaccataaactctaaatctatttttgtaattaaatgggaatgtttttcatacttcagtgtgttattcagtcgcacatactttggagcattaattttttttttttttttttttttttttttttgagatggagtcttgctctgctgcccaggctggagtgcagtggcgcgatctcggctcactgcaagctctgcctcccgggttcacgccattctcctgcctcagcctcccaagtagctgggactacaggtacccgccaccacacccggctaattttgttttgtgtttttagtagagacggggtttcactgtgttacccaggatggtctcgatttcctgacttcgtgatccgcccgcctcggcctcccaaagtgccgggattacaggcgtgagccaccgcgcccggcctggagcgttcatttttttaaaaaacaaacacttaagtgcatcatcacataatgcactccttatccatatctacatgaaacaaaaaaagaaagtctcggccgcgcgcagtggctcatgcctgtaatcccagcactttgggaggccgaggcgggtggatcacgaggtcaggagatctagactgtcctggctaacacggtaaaaccccgtctctactaaaaatacaaaaaattagccgggcgtggttgcaggcatctgtagttccagctactcgggaggctgaggcaggagaatggcctgaaccctggaggcggagcttgcgtgagccgagatcgcgccactgcactccggcctggcgacagagcgagacaccgtctcggaaaaaaaaaaaaaaaaaaaagaaaaaagaaaagaaaaagaaagtctcatagagataattatatacatgtcgtagccttgaaaactcaaagaaaacgattaaaaataatccaataatacagtaattttaatcatcagttttatcctcaaggtaaatttaacagatatacttcttaaaagtagccagcatgctgggaaaatatgttaatagtcaggagtatgttattatatatcttctgcagtgtattttctcatttatgcaaaggaagaacctggataaccccagaacacaaaaggaagatcaatgctcacagtcttgcttctctcctattctattttctaggagaaacagttgatttggttaaacatttatttgaaatagtgtatttggaaatgctataggatgatttcaattgtttccttctcaaagaaccaaccactacaacaacagtatgaagcttcacttgtgaatgattatgggaaaataactacaattaccttgattccaattatgcacaaattcaaggctacttattctaatagtacatgaaaactgtatttttgctgtgtatgtgttataaggcaataggaagatatgcgtattcacaaatggtttgtaggtacggagaaggattgtatattcaagtaatgtaatttttgatacctgaagacctcaaatgtcaaatgtttgtcaaaaagctgctttaatcacccctgaaccaaagatatattctgtgttctcctccagtgaactctaaagtgaacgatctacattttaagtttgaatacttgttagatcattcattttaaccacctcaaattatgaaaagtttattagtaatatacattcaaaacattgtcttcaaaaatcagattctgttttctggccactagatgtcacgattactctgtttggaaagacaatttgaaactgatttgttagggtgcagtatttctggggctagcatacagacattgattttgtatttttctgcatttgaatttaaaccggcaaatatttgaatcacctagaattctaattttttataatttatcaatgatgacaagaaaataaaattaaaatgttactgctgtcttagacaaatcaatgtccatctgacagagctgagaatgtcttcccctccaaggaagaattcttaccaggaaggaccacaggatcagatttgcagtttataatgcagtgtgagtgggacggtgtgaaggttaacaaggctagaaagggggagcaactattgcagaatcagggtgaaatgataagggtcagagtcaaggtcgtggcactggaatagagagcacaaggcattcagaaaatagaagagaataattcactgtcagcatgcggtaagggagagggagaagtgacagaaatgactcaggatctgaaccacagcctgtgtggccagtgatgccagtgttggaagaactcaggaagaagagaaaatgactacagaaaaggggtgtgtccacttgggacagactgacttttaggatgctgtcttctcatttctcccacttttctgtatcttttaggactttggtttccataataaaactgtaatcaggattctcattgccagaagtgaaatagacctgctgaccataaggaaacgatacaaagagcgatatggaaaatccctatttcatgatatcagagtaagtttccgacacatgatttatttggacccacattttctcctttttgaaactgagataaaagttctcattcaaataacttcatggcagactctaaaaagttaactattcagacagggataacctagtttttttcctctacacagtctttagaacatcggcaggtgctaacttagaaaaccctttacctcagctgggcgtggtggctaatgcctgtaatcccagcactttgggaggctgaggcaggcagatcacgaggtcaggagatccagaccaacctggctaacacggtgaaaccccgtctctactaaaaatacaaaaaattagccaggtgtggtggcacacgcctgtagtcccagctacccgggaggctgaggcaggagaatcgcttgaacccgggaggcggagcttgcagtgagctgagattgcgccactgcactccagcctgggcaacagagtgagactccatctcaaaaaaagaaaaagaaaaaaaaaagagaaccctttacctcagcgacagaacttattcctctttgatgtgttttacccagaagcattgatgcagtcatgcaaaatattcattctctataattgtgcttaaagagctaaattctgaagtatgatcaggctcaggaaaaatatatattgcaaaaggctgcattacttttgaagaggtttcttaaatcagttgagctgtcctctcatattgtcatagaaggcagggcagtcagtcaaatatcataaactgctaattcggagggacttaatgttcctagctatatacaactctacatatccttatccctttagcccttgaagggcaaaggagcaatgattcagtactgaacaagccagtgttttcattctgatacttttaaacttcatgcattttgatacaacctaacaaagaatcctcagaatatataggaccatttactaactgagagcctagtggaaaataaaaatgcttggcactgtgttcaaaaaagtttcaagaatttcaggatggggagagcagagcattaaaccaagccaagcacagggacataagaatagaactgaacttatattttgtgcagaactaaaagctattaccttgttcacgttgttttcatctgaaatttgtaattccaagaagcagtgttttagtttattgaaagagtaatctagaagcaatctaaagcccaagagatcacataatacagaagactttgtaggcctctggagagctgaaatggtttctaagaggaagagttgatggagcagttaagagaaatcttattccttcatctttgataaaactctcctacagccactttcaaaactctaaactcttttagtgatgagaaatgcatggcataattcattttctaaatgaatacattagttcttaggcacttattataattaatcacaaccgactcaaagtctgctaatatgaaaatgtaattaatgtaactttgctatgtacatttaaagtactgaattatcattacatgactttgtgccaaagcaccttaatatgaaagttgatacttaacaaagaaacattttataatatttatttactactatcattgattttggaaaatatagaaattatagaagaccattacaagaaaattaaaacctccctaattttctacagaaaatcattaataaacttttattctgctatggtgtgcatgtttgtgtctcctgaaaatgtatctgctgaaattctaaccccaaagaagtgatgatactaggaggtggggtctttgtgaggtgattaggtcatgaacgtggagcccatgaatgggattaatgtccttataaaataggccaaagagaacacctttgtcccttctgccatgtgagcttagaatgagaagaaggctgtctacgagagacaggcactcagcaggcaccacatctgcttgatcttggccttgccagcctctagagctgttagaaataaattcctattgtttataagtcacccagtttatggtacttttgtcacagctgcctgaacacactaagacaggtactttcagtcattttctaaagctatataaataataatatgttttgctatgtaaaagagtatttttattgaatcatggtattctgctgtataagctataaagtacacaaactacctcacattattatacattgcttctcagtttttcactattatacataatattatggtgtatatatttttagcacaaaactttgtgcttatcaatgattgataataactttcttaatatatatttcttgaggtagaattactacattaataattataaatatttttaaatcttttgagacatattaatttgttctccacattctacattcatttataacaataataataataacattagggtacatcttcctaaagttgaggagaatatttaattctaaggcaagttcttataaatacacattcaggttcaaccgactttatgtaaaccacatactactgactgtaaccagagcattattcttcaacaactttcattgggagcagtacttagggcatgttaaacctttagatgagaaaagtaaataagtttagaaaggctaatggtccatggctctttcatagtgcagtccagaggaattatgcttcctttttagaactattatgatattttatttcaaatatattatatttttcttttcagaattttgcttcagggcattataagaaagcactgcttgccatctgtgctggtgatgctgaggactactaaaatgaagaggacttggagtactgtgcactcctctttctagacacttccaaatagagattttctcacaaatttgtactgttcatggcactattaacaaaactatacaatcatattttctcttctatctttgaaattattctaagccaaagaaaactatgaatgaaagtatatgatactgaatttgcctactatcctgaatttgcctactatctaatcagcaattaaataaattgtgcatgatggaataatagaaaaattgcattggaatagattttatttaaatgtgaaccatcaacaacctacaacaa

SEQ ID NO: 2 - RNA, 1447 nt, Homo sapiens
auccagauuugcuuuuacauuuucuugccugagucugaggugaacagugaacauauuuacauuugauuuaacagugaaccuuaauucuuucuggcuucacagugaaacaaguuuaugcaaucgaucaaauauuuucaucccugagguuaacaauuaccaucaaaauguuuuguggagacuaugugcaaggaaccaucuucccagcucccaauuucaaucccauaauggaugcccaaaugcuaggaggagcacuccaaggauuugacugugacaaagacaugcugaucaacauucugacucagcgcugcaaugcacaaaggaugaugauugcagaggcauaccagagcauguauggccgggaccugauuggggauaugagggagcagcuuucggaucacuucaaagaugugauggcuggccucauguacccaccaccacuguaugaugcucaugagcucuggcaugccaugaagggaguaggcacugaugagaauugccucauugaaauacuagcuucaagaacaaauggagaaauuuuccagaugcgagaagccuacugcuugcaauacagcaauaaccuccaagaggacauuuauucagagaccucaggacacuucagagauacucucaugaacuugguccaggggaccagagaggaaggauauacagacccugcgauggcugcucaggaugcaaugguccuaugggaagccugucagcagaagacgggggagcacaaaaccaugcugcaaaugauccugugcaacaagagcuaccagcagcugcggcugguuuuccaggaauuucaaaauauuucugggcaagauaugguagaugccauuaaugaauguuaugauggauacuuucaggagcugcugguugcaauuguucucuguguucgagacaaaccagccuauuuugcuuauagauuauauagugcaauucaugacuuugguuuccauaauaaaacuguaaucaggauucucauugccagaagugaaauagaccugcugaccauaaggaaacgauacaaagagcgauauggaaaaucccuauuucaugauaucagaaauuuugcuucagggcauuauaagaaagcacugcuugccaucugugcuggugaugcugaggacuacuaaaaugaagaggacuuggaguacugugcacuccucuuucuagacacuuccaaauagagauuuucucacaaauuuguacuguucauggcacuauuaacaaaacuauacaaucauauuuucucuucuaucuuugaaauuauucuaagccaaagaaaacuaugaaugaaaguauaugauacugaauuugccuacuauccugaauuugccuacuaucuaaucagcaauuaaauaaauugugcaugauggaauaauagaaaaauugcauuggaauagauuuuauuuaaaugugaaccaucaacaaccuacaacaa

SEQ ID NO: 3 - protein, 324 aa, Homo sapiens
MFCGDYVQGTIFPAPNFNPIMDAQMLGGALQGFDCDKDMLINILTQRCNAQRMMIAEAYQSMYGRDLIGDMREQLSDHFKDVMAGLMYPPPLYDAHELWHAMKGVGTDENCLIEILASRTNGEIFQMREAYCLQYSNNLQEDIYSETSGHFRDTLMNLVQGTREEGYTDPAMAAQDAMVLWEACQQKTGEHKTMLQMILCNKSYQQLRLVFQEFQNISGQDMVDAINECYDGYFQELLVAIVLCVRDKPAYFAYRLYSAIHDFGFHNKTVIRILIARSEIDLLTIRKRYKERYGKSLFHDIRNFASGHYKKALLAICAGDAEDY

SEQ ID NO: 4 - DNA, 461336 bp, Homo sapiens
cgcggcgagggcgcgcgcgggcgggcggggaggcggaggcggcgagagcggaggcccggaggaactcggagggggagggagagaaaggccgagacggagggagccagcggcggccgaggggctggtccaggcgcggccgctaagaggagaccaagaggcgggggctgcacttgacaaccagcatgccgagatggtaagaagtttccaccctccttcctcttttattctagacttcctcagaaatgacccccgcgcccgagcgccaccggggccgcccgggggccgtgtccgccctccggcccgcggcgtgaggggcaaggggcgctgaggagggcgggccggggaccagaaccccggtccgacctgatccccgctgcgctcccagtggcctcccctaaacttggccccaagtttctgaggcgagctctaggtgggagggtgcacgtgagagggggcttctcaaggtcggccccgctcgcggcttccgcgcgaaggtgagcggctggctaggggaggctccagggcgttggggacgggctggggggacgaggtggaggggagtgggggatgaatggagcgctggcaggagctcggggaagagaggaaggcggctgggacctacgggaacttttacaacttgccgccgagtgagggaccggcggctgggcgtgggtgccgggtgcgctggggcgcagccgcccgggcccggcacgttgactcttcctctccccttgtcttcacattcggaatcttcccgtggtaaatggagatgggaggaaatgctcccgcaggctttacggagaaggtgcagaacgcagggcaggaaaatcaaccttgcagagacggctcttttcgaagtgcaattctataggagccgatttgttttacttgcacgttgactggagggtgggatttggggcctggggagggagcagaataaaaaattatatatgctgaaaaaccctaggtgaaatctcctgtgaagtgagtttaaggttgaaaaaaagttccaagtgcaagtggtggaggagatgggctggctttgccaagcgagactccagcacagcccctctacgagaagcgacttctttgcagcgaggaagcgtgcaattagttcgcctggtgatgagccgctctgtccgctttcggggaagtgatttgttagaaatggggcttgaccactcccttctttttagtttgcttcctcccagcgtcgctattgttacccccacttggggatctgacatggtgtattccgtatatagagggaacatatgagaatacaggtgagatagcgggttggcattttttcctcttccctgctccctaatgtgacatctcttgtttcagtgatcaaagtcacaactggagtgtaggagatgggactgtcaaatgcaggggcgcgtacacacacacacacacacaaaagcaagagcccaggactgtggttacagtaacgctgacagaaattaaagtggttttgaaagcagcgtgcgatttatgatggttcccatttaccctagagtcaagctgttgtaaaactgacgtacaaaagacatcataaaataatcctgtgtacccaggattaaagtggcaaaaagtggcctgttttatttttatatacttcgtggacacttggaattgttgaaagccgtgtttaagtgagacatcacaacaatattaaatatatctgtttagagcttgagagtttttcttctaacgggcgttttacacaagaacactgtaaaagccggtggcaggtattatttttcttccctttaccctagcctatgttaactatttgtctacacatgtattcctatatcctaatgactttgaactgtggctaagcctgtctgccttccactgctttgtattctgcaatttcacgtgttactgtccacacgcatacatgctttaaatgggaggaatttatttctggcacgttacttagtgtgtctgatctgaagatgtaccctagtagtgagaccttgtacaagttaacagaacatttactttttggacaaacacacacacacacacaatcccttgtgagcctttagagagtatctgtgttttatatttgtagccgtttcatgtaaactgttcagtcttaatgaagttcttagttcccagagtgcgctgtattaaaagtccagattgctaatcactttaccaaagtacaggagtatctttacctgagggaagtaataacgagcttgaacctgaactttgttttgagtatcttttgagaaaggtctgaaactttttttcctcttgagaatattaagttgggtggtgtttgcatgtaagactttgaataagaataaactgtgcattatattttacaattaatattaggaaaatgttaatagcagtacattcctactacctgattttttcttctatttgagatgtaagatatctgtcagatagagatatgtgattacaaaaagaagcagacaaaagcagagctgactattgctatattaaaatgtaagtgttacagtttgaattttcaagtgagagttcttgagttcagtgctttacataacattttgtcctaatcttgcttgctgtcagggatgtttcatggttgtgcaattgctgcagtcaagaatgccaatttgcattccaggagtgtcatttgattacttttatctgcacagctccaagaccggcccagacctctcgtttcatcttgccatgtcacgagtcaatgctgtgtcgtcttttcaaaaatctgcctgatttagacaagaaagaaaagtactttcatgttgcagccgcagtcccctgctaacttgtcagcagcaggatatgattcacttgggcccagaagaatggaacagagaggcgggttaggcggttcaataaagcccacggacaggtagtgtgtgacatccccagagagccgcagttaatgaagaacaggtctgcttagttctccacacgctgacctggtgctgtccccacagttttctcatttgatctttcccagcaaattgatcttttcttgtatttttttgccttccaagttagtccttgtgggactgaaattagcagagcaacttaagttggataatacagctgttcagaaaagaagaaattggacactggctcaaaaaggggtgggggtgggggggtagagggagctattctttttgttgttgttcctgggaatatttcttatattaagggagtccaaaatagatgatgacttgaagttagtggtttcctttacttttaattttacagttaagggttcagcacggttttaaatattccttaagtatttgaaagatggccttagtgaatatgaggagttcaatttagtactgttcacattcacttgtttgagatgatttgccagttgacaatgtggcttttatggttattgtaagatggcatacttcaactgtattatttatagtcttctaaacaacctacgatccccaaatatccaatactaaattgcaggtaagattaaacaataaaaaagtcattatactagtattgtgtataaatactatggtacatgaaaatgttttctatactattagcatctttgttttatataaaccccacagatacagttcatgaagtgtttttttcctgaatttttgagattctgcatttaaatgtagatttttaaaactgagaccagaccacaagtttgaatttctgtggatgttcatacatgttgttgttttttgacattaaaattaattttagacaggatgggtaaatttatgtcgtatggtttaatctgattaaagtttcactatagaattctgtacataaagcttaggttggaagcagtttatagattcttaacttgataaatatataaggagcaacgctttctgatttactcagcagatggtctcatttaccatctacatccttacaagaaacagagtggaaaacatttcttgtggaaggggaggtagcctcctcaaatctttcctgttggatgggaattatatagtatcattggttagtaaaatcccctctgaagagctagagggagcctcatgattttattagatatacttaaggtttaaaaaacactctggccatcagaatgttgcacaaaaagagtaggtaatgaatactggctcagtgttgaggctgggaggtgctattatggttttttttttttttttttttttaaaagtgacagaagcaaaagaactttctacaagaacagtcaaggcgtcagctaagctttctaggcttttgcctttcaggtgatttgaagatcaggcaaaatgcaaccagatactatattttaaatgttttggtttgactaactactgtttgtagtttttgtcaactgagggagttactctcgttttaggaggccagtcttcagagttctattaaaagtagcttcctacgaaatcaccgagaagtgggttaacttcttttagtttatgaaggacaaccccttttctgtaaatgatggttttggagtagttctacatacaacttctgtattccagagagaaattttctttaaaataaatgcttcctgttataagcataaatgttaaactatttataaacctgacttattatggatcaaaaaataagttaaagaaataggatttaaatgatattacattcaataattgtcatttaatttcatatttaccactttccattaacatttgtgatacagttatgttaaagagtcattgatcataattgcactttaatatttatatactagtttttaggagcattactttagacaaacatatttatcatttaagtaaataatataatccagtgagataaactacccagatttgtccttcttaaaatcttttgcacagtagctctcattatgttgctagccaataaaagtctttatttgttgcttattagaaccctcagtacactcaagagttcagctataatttaatttggctgttcaaagagcctcccttgttttgaaatatattctcagtatgcttttaccatttgttacgaacccatattctaactcaatgcgtaagaacctatattctaactcaatatgcgtaagaatgatattacagatatatcattctttaagtttttgctatcgtcataacttttttcctttaaaaatatccgtacataacaatatcagttttgttctttttgctctattttctctttgacattctagagtatttttctcttggtgatttaaattgttttgctgttataatttaaaataaacttcctaaggaatacaaccttcccttgaggtatagtgagaagggcaccaaaaaataataggttcgataattaagaattctagctgaggccatttcacagttgcaatcacttacaattacaaaaagtttgcctggtacttcacaaattgctagtaactgctgtgaagtttttcaatgagtagaaggtggctttgagagttttggttgtatttgtaacaaattacgttcactaaagactagaacttgactataaaactctaataagatgagtatcaggaattcttccataaggaaggcagaatgtgaaactcctaaatgactcactgtgtatgtatcttaccagtgggaatagcatcaagccagccttctagatacagtatttaatagttgtcaaaatgtacagtattgtcttggaacttgtggttcatgagttcatagtccctgcttttttgtgtttattacaaagatgtaacaacctacacaaaacatttttctcttataatgaccttacatttgccaaagtgccccatgctgaaattccttttcagtgtctttttttttttttttttcagtccaaagccagacgtgtacccagacacaaaagcctctgtgtatagcaagctgttttaaatattgtgactcgacgatgtgctgtcctttctctgcttgagccaaggatctctgctcagtgtctgtggattaccaagctccttctttattgtacctcttgtcaactattcctattcatttaacctttcattagtgtctgtgcagcttcactgtctggaaaggcaaggaaaaaccgaaaggccccactgtcacagttattagatttctcggttacatcccagcaaccgtaaagaagtaagcgtcgagactattgtcgtgcatgctgctgtcctggggtgcagctcttctgtgcatgtcaaggacatgtgccacatgttgatatgcatcccagggataaatgcacaacatgggggataggccgacgctggcagtaatgagctttgtaggagttattgcaaagaccaacagtttgtgaaggaattttgcttaacaggccaaggagatagacagagttgagggttgccaagatttgcctgtgcggggcttgtcagtcacattgttttcatccaaacttcatttgaggggaaaattgaatacatttgacagcaatggaaagtcttattttcttttttcaaatctttcagaggacaaaagcagtatttctggtgactaacataactatttttagtactgactaaatcatatatatgaatggatctattagcagtttatctttttccatatctagagaataattaaaagatatttcatagatgtcatatatatgttttaaaatctatgtaaaaataatgtagcctattaattttcctttgctcttttcctcctttgattttcctctagcatagcctggttctttagaaatacatttgcttaattggctagatgcagaggagaaaaaggatgataatgtggtcattttcaaatcataaataaaataagtatttgtaaattttgtattggaaaatattattttaaaatcttagagatgaagagaattacctttttaagaattctgaaaacacttgaatagaaaatggtacattataatacatttgtccctctttacccaaaagtttgtctttttttcttttttaaactaggagaaccgtttttactgagggtaaataaaatatttttgtctcctgatttcaacagattttgtcagttttccaaactcttttggggttctccaataacttttcaaatatgttaatgacttattgccaaatccctgtaaagttatttttaatttttcttgaccttacctcttttaggcaaggctttttaacagttgtactttctctgttaaggttttttttgaaacggaatctcgctctgtcgcccaaactagagtgcagtggcgtgattttggctcactgcaacctccatctcctgggttcaagagattctcctgcctcagcctcccgattagctgggactacaagcgtgcgccactgcgcttggctaatttttgtatttttagtagggacaaggtttcaccatgttgtccaggctggtcccgaactcctgacctcaggtgatccactggcctcggcctcccaaagtgctgggattacagtgtgatcccacagtgagccactgtgcccagccacctctattaagcttttcttagtgtcttgtgaaagtatgggctaagttatccttgttttagggagagagagttatttttcatagtctttcccccaggtgggatgctaaatgcccagctatcctatcctagggctatgccccagccttttggccagcgggcggaagtactgtgtagaatatattgagatggggcagggcgtggtggctcatgcctgtaatcccagcactttgggaggctcaggtgggtggatcacaaggtcaggagttcaagaccagcctggccaatatggtgaaaccccgtctttactaaaaatacaaaaattagctgggcgtggtggcgggcacctataatcccagctactcgggaggctgaggcaggagaatcacttgaacctgggaggcggaggttgcagtgagccaagatctcgccactgcactctagcctgagcgacagagcaagactttgtctcaaaaaaaaaaaaaaaaatctatctatatatagctatatatagatgaatctgccgtggtcatctaaggctggtgaccttcccacagaaaaagcatgagtgtcttaacattcctttttctaacagtttcatttccatttattatggtttgtgttgggagtagtagaagagaaaagagggacttgtgaagatgaaggccataattttaactcttcccctggcaatgaaaacccccaaattagaacaaaataggttagtgctgtgtggtaattaaagagagaggaatacatggcagtagctactctctgcaggtatcctgcacttgttctttatccagtcagtatctctacgcaggtgactggctgtttcttggaaggcagttgtactgttgcctgttagagactcagaacagcgctgggacggggtatctatagaggccctgttctattccacctacttttgatagcctgtgttctctcatttgtaagtcaagtgagtttggtaatttctaagtgcctttccaaatggtacatttcatattttatataacactatataatcatagcagtttgctgttattagctttattgagatataactcacccacttaaaatgtacattaatattccattttatggatgtactacctcttatatatccattcaatgaaagcacatttgggttgtttacactttttgagtaatgtggccctgaacattcatgtacaagtttttgtggacataatgttttcatttctcttgggtatatgctcaagagtagaattgttggatagtatggcctatctacttataactttttgaggaacttccaaattgttttccaacgcaactgcagcattttacttttcaaccaatagtgtataattcttccagtctctctacaccctcctcaacacttgttatgtgtcttttttttttttgtcttttgagatggagtctcgctctgtcgcccaggctggagtccagtggtgcaatctcggctcactgcaagctccacctcccaggttcacgccattctcctgcctcagccttctgagtagctgggactacaggcgcccgccaccatgactggctaattttttgtatttttagtagagacgttgtttcactgtgttagccaggatggtctcgatctcctgacctcgtcatcctcccgcctcggcctcccaaagtgttgggatttcaggcgtgagccaccgcgcctggcccttgttattgtctttttatttttacagatcttagtgggtgtgaagtagtatctttttatttgaatcatactagtgactatgaagtgatatctctgtggttttgatttgcatttgcctgatggctagtgatgttgagcatcttatgcactttattggccatttgtgtatcttttctggaaaacagagacatgtctccattggccatttttcacttgggttatttgtctttttattatgcagttttaagtgctgtttatatattctgagtacaagccctctgctaggtacaaggtttgcaaatactttatcctattctgtgggttgtctttatttatttatttatttttaaagagacagggtctttctagttctgttgtgcaggttggagtgcagtggtatgattatggctcactgcagccttgaactcctgggctcaagaaatcctcctgcttcagcctccgtagtaattgggactacaagtgcaagccacgatgcctggttaatttatatatatatatatatatattttgtagagatagggtattaccatgttgcccagcctggtttcaaactcctggcctcaagcgatcctgtttccttgaccccccaaaattctgggattacaggcataagccactgtgactgtgcgcagctgtctttttttttttttgagacagagtcttgctctggcgctcaggcagtggcgtgatctcagctcactgcaacctccacctcttgggtttaagccattgtcctgcctcagcgtcccgagtagctggcattacaggcatgtgccaacatgcccggctaatttttgtatttttagtggagatagggtttctctatgttggccaggctggtctctttaaactcctggcctcaggtgatctgctggtcttggcctcccaaagtgctgggattactggcatgagccaccacgcccagccccggctgtcttttgactttttgatggtgccttttcaagcacagaaatttttgatgaagtctaatttatcaatttttgttgttgttgatgtttctgtccttggtatgctatctaagaaactattgtctaacccaagatcatgaagatttacctctgtgttttttttgataagtgtcttacagtttgagctcccacagggtggattcatagatctttaatccatttggattaacttctgtaaatagtatgaggtaggggtacaactttattcttttgaatgtggatgtctgttgttcccagcactatttgttgaaaagacagtttttctccattgaggtgtctgggtacccttgtcaaaaattaattgaccatgatatataagggtttatttctggaatttctgttctattccattgatctttctgtctgtccttgtgccagtaccacactgtcttgactactgtagctttgtattaagttttgcaattgagaagtgtgagtcctacaacttcgttctgttcttctttttcaagattgttttagccattcttagttccttagaagttgactttttaaaaagcaatttggattgtggtagaaaacaacgtaaaatgtatcttgttaatccttttttttttttgagatggagtctcactctgtcgtccatgctggagtgcagtggtgtgatctcggctcactgcagcctccacctccctggttcaagcaattcccctgcctgagtctcccaagtagctgggattacaggcacatggcaccatgactggctaatttttttgtatttttagtagagatggggtttcaccatgttggccagactgttctccaactcttgacctcagcattctgcccgccttggcctcccaaagtgctgggataacaggcgtgagccgccgtgcctggcccatgttaaccatttttaagtgtacagttcagtagtgttttctgtaacttaacgtacagcagatctctagaacattttcattctgcaaagctgaaattttttaacctttgaataacaactcccgtttaccttttcctcccagccctgggaaaccactattctagcttctatttctaagagtttgcctactttagatgcctcatagaagtggaatcatgcagtacatatttgtctttttgttccggcttatttcacttagctagaaacttaatgttcttaaggttcatttatgttgtagcatacaacagaattgtcttcatttttaaggctaaataatatttcatcatatgtatataccacattttctttatccattcatctgtagatagacatttagtttgctttccacctcttggctcttgtgaattatgctgttgtgaatataagtatgcaaatagctgtaaaagatactgctttcaatctttggacatatatgtagaagtgggatagctggatcatacagtagttcttaattttttgaggaacctccatactgttttctataagggcagcatcgtttacattcctgccaacagtgcacaagggttccaatttctctacaacctcacagcttattatttcctgttttttttttttgatggtaaccattcaaaaatggttgaggtgatatctcagtgtggttttgatttgcctttccttgattcctgatgttaagcatattttcacgtgctttttgggcatttgtatatgtcctctttgtggacatatctattcaagtccttcacctatttttaaatcaggctttttttgttgttgttgagttttaagagttgtctatatgtctataccccttatcagaaatatgatttacacattttttctcactttctatagtttatctcttcactctgctgattgtttcctttgcttttgcagcacagaagtttcttttttctttttttcttttttttttgagatggagtctccctctttcgcccaggctggagtgcagtggtgcaatcttggctcactgcaaactccgcctcccgggttcacgccattctcctgcctcagcctcccgagtagctgggactacaggcacccgccaccatgcctggctaatttttttgtatttttcatagagacggggttttaccatgttagccaggatggtcttgatcctcctgacctcgtgatccacccgcctcggcctcccaaagtgctgggattacaggcgtgagccaccgcgcctggccagaagtttctaagtttgattcagttccatttgtctattcttgcttttgttgcctttagcagtttacttttaaagctcagatatgtctgatcctcagaagagtaaaggctacattaaaaaagtacattctattgtttaggtaaaaaagtcttggtagtactccaggggacaagaaatatgtcatttggtagccaaaaaatgatagctcctggttccctgtgaaacaccctggttttactttgatgtttcttaattatcattgagtttaaaagcattctaggtgttccgtatgataagagacacacttcatgccctgaagggtggaattaagtacccagaaataattgtttttggttttataaatacctcaaaaggaaagggggaagaaaaccattattgagaaaatttgtcttcctagacatcccgtcatgactagaaaaacaccaacagagataaaactaaaaattattgtatgatctccaaacccaaaataactggtccagtgaagttttatataaataaccatgttcaaatctggtatagcatatttggaaacatgagcttgctttacagtttacctggcaaattttgtaattaaaatacctcatcgttgaattagagaaacttgagagcaaatgaaaggtaacttaatttagaggcagctatattgcttcattgttgaattaaaagaaatattcattcccttacagttctaattttctctttattcatgctaataaaggctgatatttattttcatctaagtaattgcttttctagtattctgatggaccattcttcactgcattgtctgtttctggccttttgccagttattttagacaaaagtttcattatttagtcagcatcaactattaattagatatgtaactgttcaaatttatacaaagcgagtgtgcattttttcatcataagtgtttacgtacataaagagtaattatccaatttaaaatgatatgatgtattttaaggataattttttttttccctaggggaaacaattctgtgaaaattctgtagaggatttaaaatcacttctttttttttttttttttttttttttatttgagacagagtctcactctgttgcccaggctggtgtgcagtggcacaatgtcggctcactgcaacctccgccggccgatttcaagtgattctcctgccttagcctcccgagtagctgggattacaggtgcctgccaacccgcccggctaattttgttttgtatgtttagacggggtttcaccacgctggacaggctgatctcgaactcctgacctctggtgatctgcccacctcaacctcccaaagtgctgggattacatgcgtgagccactgtgcctggcctgaaatcacttctaaaaattgttacagtaaaaattttatgtttaccagacgtaaattttggttacatatacatttatcccaattgacacattttattcatactgaataaaacattaatgttacttttctattttttatgatgtattttgacatgtgtttagatgtatgttttatatgtatggactgacaaaatcatatatgctattatttggcatcttatgtggttggaggtcataaagaatgtaagtaactgaaacaatacatttgctcaaagaaaggccactcaattctctgccctgtggtatctaatctccctgtaatacacatttcaccatctaggattggagaagttcattctatcaacacgaatgctaacaggtaggcttctggaagtacaatgtgatagttcagatctttctctgattcaaaatggtgatttaaaagaaaacatacttggctgaattggcttttgatagactaaaacattaatttgccttaatgtgcattaacgctaaaggatactaaaaaacaaaaatttttttaaacccagaaattctaccaggtctggagccatatttttcacccagtaaatgtcccttgtaagaaatatatttacacgaagggctgggtgcagtggtgcatgcctgtagtcccaactatttgggaggctgaggcaggagaatcattttgagtctagaagtacaagtccagcctgggcaagatagtgagatcctgtctctaaaaaaataaataagaaatattttcgcttcaagaatttatttatatctgtgcattggtctttgaagcttcccttttgtctgtaaacagcaaccagtcgctgacatgacatatttgtgtacaaaggacagtgataattagatatgctggaatttgtgtgtgtgtgtgtgtgtgtgtgtgagagagagagagagtgtgtgtgaagaaatatggatgagaaactggtagtttgctgcttccttatgggggagggtagaaggcagaatagaaggtagaatagtatagttgactgaaatttttttggaggggaagggcagggtttaccattaatgtactttcattttgcaatagataatacttgatacattgttttttgtggtttttaacatatatttatggatggcatggatgaatgttgagtgtcttacttactgttttactagtatgactgtcaaattgcattcctgaagtacggatatgctaaggtaataaatctgctagcagccagcaagtaaatgtttacttactatatatggaataacttgctgcagatttccatgaaacaacattagacaattgtgtactgatttggtaaaaataaaaaagatgtggccgggtgtggtggctcacgcctgtaatcccagcactttgggaggccgaggcaggcagatcatggggtcaggagatcgagaccatcctggctaacatggtgaaaccccgtctctacttaaaaaaaaaaaaaaatacaagaaatcagccgggcgtggtcgcgggcgcctgtagtcccagctacgtgggaggctgaggcaggagaatggcgtgaacccgggaggtggaggttgcagtgagccgagattgcgccgctgcactccagcctgggcgacagagcgagactccgtctcaaaaaacaaaaaaaagatgcttttaaaaattgttagattttgatgttcaagctgtacatttggcgtaggcatgggacttctaattgccttcatttgccaaagtataacaacctttttttattttagaatacaacaatttaacaagcgtttgaatttctatgatgtatgtgatactctattaggtgccataggtattacagatgaagtagaagctgtcatcctaagagagagcacaaaattcactggtaaagggatattcattatcttaaaagaattaaccatagtccatggtcttcctctggcatatgaagccttaggaacctaattttgttaacataccattgagaaagatcaccttttcatggatgcattcagtttgttcaccagctgaggagtggagatcacacacacacacacacacgccatgtgaacatgtatgtatctgtataccatatgaggtggaatactcatgtactcatattgaaatgattagtacgtcttctccttggcaggcaaatttaaatggggagtcagattataatccaaatgttgttcatctctttatggggttggaatttcagcagagaatattaagggtgggatgggggcctgagggtcttctcctcctatagagaaattctttccagtgacctgtgatgttcacggtgcacactttggactcctttcctgggctgtgcttgtaagagtattgacagtgtttacccctcttgctttttttctgctaccattgcccttgtgatagacaaatttctctttctttagatacgttaatattctcaagcagatattaggcaactgtcctgggagctagttgttaaggtgactttgcctctctttggttttttatggatctaatgcagatggcagtctcatttcactcgtttcaaattttcttgggggatacctcatgctactgccttacacataacatgttttgtatacggataagtggaaatggtggaaaaaaagatatatattgcaagaaaaaaaagacttagaaactagttattaaatacctggtagagaaagtttcttttgttaaatgccttatagagaaatatcttgatctgaaattgactttatatacaggtggaataaactgctctagaaatcaagagggagtatgtgtatttaatctctgtatctgttttctgtgtctcttttccatcctaaaataagggttaagattaggttttaaagattcttaataattctgtacattgtgtgatgcccaccatctatttgtggtattattttatggaccagaaagttaaagctgtacctttaatttcacattggttaattctagcagcttcccaattagtgtcatttttttacctttcaatctttccttccttttaaaacacttgaacatcaagaataatctgctatgggaagagaaagtagaaaggaaagacactgaacaaacatccacttgatgttaggcagcaggacagaagttggtggtccagggagcagcctgccggcctggtgtccttaggctccagtctgactttagaagtcccatgtctatgaacttacatccataagttcaggcgacatgtaagtttccgagcagtcatagtacaagcatgtaatgtgagaattttattatttaaacccgcagagcttaatgaactccaaattttattttattttatttttttgagacagagtctccctctattgctcaggctagagtgcagtggctcagtcttggctcactgcaacctctgtctcccaggttcaagcagttctcctgcctcaccctcccgagtagctgggattacagatatgcactaccacgtccagctaattttttgtagttttagtacagacagggtttcaccatgttggccaggctggtcttgaactcctgacctcaagagattgacccatctcagcctcctaaagtggtgggattgcaggcgcgagccacagcgcccagctgcaaattttaaatttgaaaatgtgtctgaaatgaaaataaagtgaggggaggtgttggagagaatggagaaattgcacaggaattgtagaacatggattaaaatgtaattagaaagttacgttgaaaatcaaagaactagttaaaatgagtgtcattatgctttttttttttttttttgagacaaggtctcactctcatcactcaggctggagtgcagtggcatgatcatggctcactgcagcctcgacctccctgggctcaggtgatcctccaccttagcctcctaactgggcctacagctgcatgccaccacggccagctagttttttgtagagatggagttttgccatgctggccaggctggtcatgaactcctgaccttaagtgatccgcctgcctgggcctcccaaagtgctgggattacaggcgtgagccactgtatcctgcccagaatactattgtatcttctaagtggcctagtacttctatgcttgcctctctcctcccactactcctagaagactatccacaggttgatcacttcttatctcacaaccttccagtgacttcttatcatacctgcagtgaaatcccaactccttaccatcactgaaaaggatatgtaatgtttgtgacccagcccaactctgacgccgtttcctgccactgctccctctaatccagccttgctgattttccacaggccatagaactttgctaagctggtacctacctcagccctttgcatggggtttttctctgcctgtgaggttcttttttttcacacttttgcagggcttcctccctcatttcactagagtctcctctggaatgtcagtcctttaaagagaccttcctgccaaccttccctcctgtgtccctatcagtgtatgtttctttggtctcttaccctgatttttttcttcacagcacactgccgcttgaaagtatatttaatttttttatttacatgtagtttatcttcccaccaccatgaagccccataagaacagggtcctttgtcttactaattctgcatttccattacctgtagcaacactcaacaaatatttattgaatgaatgaatggatgaatatctcacatatgattgtccttgtgaatatgaacggattctttatcaatagttatcaaaacttatttattataaccattgagagttctttggcatctgctgctgaacttttctgaactgcttatgcttagctcagttggaatagtggtttccaggatagatgtaaacacttcaaggggtatgcagaaatcatcctttacgatttgggggaaaatatattagaaatttgatttatcttgttcacctatttttgtgttttatagtgtgcatgatatatatataaggggaacattgtgctgtcaaaaaaactgagactggatagagcatgatctggacaggatggttaactttgtttaaagcaaaatgtatctctgtagtcaggctattttacagattttgtgcttttgtataataaggcggtgtgactgcgggtgagagtgtaaaatctgttcccactcttcaaaagatcacacatctcatgttgagttgaaagtgaaatattatatatgagattcagcatgaatgtgtatatctatatgttttatttaatattcatcctctggtggaatttacaagtctcttcagttcagggtatacctgttttggggtcctttgtacctgtgctaacatatgtgtgagaagtatgtgagctctttcagtgactgaaaaaattattacttgattggtctgttttggcgtgatctgggcttttgattaatctttgaataactttttccttcatttttaatagttcaggcttgttaatgatgcttcactggcttctttgggtatctgtgacttaagtttttaaaaacagttttattgagaaataatttgcataccatagaattcattgctatgaaaagttttacagtaccattttataattacatgtgattttcaagacacaggaaaataaagaaatggtatgcttagaatttggaagaaagtctagttatgttttcattttatttttatttttttgagacagggtctcaccctgtcacccaggctggagtgtagtggcatgatcatggctcactgcagccttgacctgctgggctccagcaatcctactgcctcagcctcctgagtagctgggactacacgcatgagccatcatgcctgggtaagtttttttttttgtagagacaaggtctcactatgctgcccaggctggtctcaaactcctgggatcaagcaatcctcctgccttggcctcccaaagtgctgggattataggcatgagccactgcacccagccgctgtactgattttaaatactttttaagtgaaatgagattttataacatttgaagaacttaaaatgtttgacaggattaataaatttgaatgaagcattgaaataattactatactaatgaatacactaaggaaatttgaaaaccacaaataagcagttacaaataagtattattatttataaaatagtcaccctagaagatgatgcagtgatggtgtcatagcttaaaatgctcttggaggtcttcattttacattgatttcagacagcctgtgtctagttcttctaagcgtctttggtgctagcaaatcttccatgacataagctttgattttctgaatcttcaaaagtcttttggtgttaacttacttggtgggtgttaaaacaagataattctatttttgatttttttttttatttactttttagaagcagagtctccctctgtcaccctgaccggagtgcagtgatgcaataataactcactgcagccttgaactcttggacttaagcgatccccctacctcagcttcctgaggtattgttcaggctagtctccaactcctggactcaagtgatccttccaccttcaccttccacagtggtggaattacaggcatgggctaccacccccagcctatttttgatttagaaaaaagacaacattgatttttcacatatagtttacaagttggccctagaagtatttacagatgatgagttctagaaatattttgagcaatggtagcattgttggaagaagtacagtgtcttaagctgacaattttgacattgattctttcctcccactagttatggagcttctttaaatctataaaaagccatttcactatataagaattggtatcatattttgtgcacttatagattcatgcgtaccatacatgcatgcttataaatatcattccactgaccaaagtgtgttattattttgtagccctttgtagccagctctatgttttaagtgcctgataaattctactgtagagtgaattttttctattctaagtaaaattttggagcctgagaaggcttctaaaggcaaaggatatcaagaaaagttttaactaagatgtgagactgcatgagtgcttcatgatacgaaatggttttatatataggtcttagataagaaattagagaggttgacagataacctacctagtctgtttttttagttgagcaaatctgtgtgtggggggcataaacaaatactagtgacattagaaatcagaaagctagtgaagtacaaatttgtgcacataacactgtttgtgggacagccttattcatactggtctttgacaaaagtcaaaggaaaaagtagttgccaaagaggaatatgacttttttttttgtactttagggtttgtttttgaatttcagcaagttatggtttgaggtaatactaatcagtttttttatgttgactttttggttatcaattaagaaaagcattagtgctttggaaaaatctgtgttgttgaacttcttccaatttgtatacaacctcttctccacagcgtaaaatgcaaattttgcatggggtcaggtgcggtggctcacgcctatagtcccagcactttgggaggcagaggcgagtaggtcacttgaagtcaggagttcgggaccagcctggccaacatggtgaaaccccatctctactaaaaatacaaaaattagtcgggcgtggtggcatgcgcctgtaatctcagctactttgggggctgaggcaggagacttgcttgaacttgggaggtggaggttgcagcgagccgagattgcgccactgtactccagcctgggcgacagagggagactccatctcaaaaaaaaaaaaaaaaaaaaaaaatcttttgcatggaatctgcagatctaggaatcattttattgttaaaaatataactagcaattttgaaaattcagtctgctttgtgaagtcagactctagaaaatttatagatttttttggtggggggaatgagagttcgggaaataaaaagaaatgaaataaatttgactccaggaaagctaattttacatttgtttcttcattcctccctggggctctctgaaactctggaattttctcatttaaaagaaagctagaacaacctgtgttggacatacaggttgagcctctggtatttgaaatgcttgggaccaaaattcagatttattcagattttggaatatttacatttacataatggggtatctcagggacaggacctaagtctaaacatgaaattcattaatttttcttatatattttatacacatagcctggaagtaattttgtatatttttacattttatgcctgaattaaagtttgtgtacgtggacatcagaaagcaatggtgtcaggtgtggaattttccacttaggacatgttggtactcaaaaagtgtgggattttagagcattttatgatttttggatttaggatgctcagcctgtaaacttgagggtcaaacttttcttgtgttagttgaaatctcctgggtgctttcttttaaccaaatcccaaagtcttttttataactaatatgctagatttcctacattgttttatgaaggtagagagggtccttagcaggccttgttttcaggtgtaaagttctgctggaccaaaacctgagggcgtaattaacagtgtctttggagggactgtttgtgctgtcttcatggaccatttggctcataagatgggatttggttcataattcattgtcatgtactgtaactcctgtgggagtataacgtctagctgttttgcattggataggttctgaatgctttatcttgttccagggtggattattatactcaagaatgcacttaattacaagctttatgtttccagcacccattcacaatacctcctcttcactacacctgacttcatcgatggaatttcatttgtagattgacttgggagatggaagctgtcagacttgaagtctgcctcctttttttggtgccttctctttactttgatattttgaacctttctaacttaaaatttgtttttaggttaattttctcagcaaaagaaatttatgtttgataagatactaagggaaaaggcagcatttattaatattggatgtttcctaattagaatatcttaagagtttgaattttgttgtgttttcataagctactgcatcataggtttcattgtctttgaacagagacttagaaaagggatgctttggaatatttcttgtttcagtcttttgagattgaacacacaggtttcttacaggatttgttttttatgtatttatgtaacctgtctctccagtttcctgaattcatgcttcatatgagcttaatcatactttattttaaataatcaactgtttacacatctaccgcacatgctgctccgtagattctcaggtgtatctttatggtcttttcatttttctgtctttatcaaggaataaatgatcctaactggatcatgatttacttgtggatttattcaatagttttgtgttttagtttttaaagccttgctcaatggttatggtttggggatatcttgatatatctcggacaagcttttaattgtcaaaattaagttatactaccttgtatattttagtcttagaatttaatgttctattcctgattgaaaaacctgtgactagcacttcaaaatttcctaaacgtgtttggtcaattcttttttcctttttaaccaaatgaattttataaagtcaacttccttaatttgtaatgtaggctcagtgaaagcttcagggttgttgcccgccgcccccccccccccgccccgagaaatcttcagagagatgtttaaacaaatcaaaatatacttaaagtgtaaaaaaggtaatttgatgtggcaagttttaaataaataaaaaaaataaacgcacacactccataacctttctttgagtcttggtttaagttctctgtcatatagtgccaaaaactttgttttgagctgcgtgtgtgttgaaacatgtatgcctgtcctagtgtcataactaattatatctcttatatgcttacttctagtaattggaaagtagacctaccgcagcatacatcttcacatttagttttatcttgaggacctgctacagagatcattttctaccatgcagcaacttgacattgtgaacagatattactattttaaatatattatctactttgtgttttgcagaaatagtgtactttcagggaagttaagtttcgggtgtttccaaagcacatctgtctttaccagtaattatacactaatactgcctttgcagttttgactgagatatttcatctgtgaattggaaattgatggcctagtgctgtgatagcaaaattttataggatttctttttactcaaagttttcaaaagattgtggctgatggaaaacctgctggtgctttggtcacttactcttcatggattggtctaaaataatttggggcttcttttgtaaaagtgtattgtagaattttcacaaacttagaaatcctgtcttagatatgcttatgactggggccgcaaactgtttctcatatgcaccagcttgtatgaaaatatgtggtccttgtccatgcctgctgaaagagaaaccctaccagtcttcagtttctgagctgcagccttgtcgaaattaaagtcttaggactgggagcagttaatgctggtgatagattgtggtatttagcgctgtgctgtgttgcgtggtggacttacacgattctagtcagaacttgggaaagaatataccacagaattggtgacaaatatttttcaaagagaaatacgatgacttttcttattaatgagcagaccttttgggctttgcttaaggaaatagtgaaaagattgtacagttctgttattgataatggtttagaatttaacactgaaaatgctggattttctttcctcttattaagttaatgtattactttgaagcatcttttctttttttacagttagaaattcaccaaaactatatttcaaacgtagctctttttaattttatactaaattaatttttttttttttttttgagacggtgtctcgctctgtctcccacgttggagtgcagtggcgcgatctggggtcagtgcaagctccgtctcctgggttcacgccattctcctgcgtcagcctccggactgcaggtgcccgccaccgcggccagctaatttttttgtatttttagtagagacggggtttcaccgtgttagccaggatggtctcaatctcctgacctcctgatccgcccgtctcggcctcccaaagtgctgggattacaggcgtgagccaccgcgcccgggccactaaattagtttttataaattctgcattgtttctgtcatatggtaacttaagtatgcagaggcattgaacttgaacattttgtgttctggaacgtggggtttggattcttggtataattttcctattttatttttattttattttgagacggagtcttgctttgtcgcccaggctggagtgcagaggtgcgatctcggctcactgcaagctccgcctctcaagttcacgccattctcctgcctcggcctcccaagtagctgggactacaggcccacgccgctacacccggctaattttttgtatttttagtagagatggggtttcactgtgttagccaggatggtctcgatctcctgaccttgtgatccgcccgccttggcctcccaaattgctgggattacaggtgtgagccaccgcgcccggccaattttcctattttgaaaacccaactaccgtggtttctttctaatgcgtatattatgacttgtagcatttgaaaagctccatggtctaggccatgtgacttctgaggactgtaactgtaaaaaagctggtgttgaataattaaaaactccctccattttaaaaaaatgcccatttctcttagaatttttatggtgtcagtcaaattaatgcaggtatgtttggttttaagaataacatgatagaaatccgaatttacactgataggctgcctaagagaaagttatttcaaaacatggggcatcctggcagtgcctgggaaggttggcccccagcccgactgataggaacttcctactcatcagttcgctgtgaagtactgacaggtggagggggtttaggcttctttgggttctgaacctggtgatgctactacctacacagtgtttggaaatcttgggcgatgttttgtttgtcacaaatgactcaactggggggctgcctcctgctatttagtgggtcagggacactgcagcatcaggattgcagaacaatttacatacagtgatgagttgttctgccccaaataccaataatacctttcccagaaatgactggatagttattgatataaaaaaatgaaaaatggctgggtgcggtggcgcatgcctgtaatcccagcactttggccaaggcaggtggatcacctgaggtaaggagtccgagaccagcctggccaacatggtgaaaacccgtctctactaaaaatacaaaaattagccgggcgtggtggcgggtgcctgtagtcccagctactcgggaggctgaggcaggaagaatcgcttgaacctggtaggcggaggttgcagtgagccgagatctcgccactgcactccagcctgggtgacagagcgagactccgtctcaaaaaaaaaaaaaaaaaaaaaagaaaagaaaaatattcgtaaaaatactactcttgctccccatccctagaattaccacctgacatcttttttttttaaaggaatgttgattttttttaaggtgtgtacttgattgaacactgaattctacttcttaacgtttttaagtaaacatgatttgtaaaggcatatggatattttatgcagttggtatattaatagtatttagtcgtaagcccccaactcaaacccagatatacccgtttttgcaaacacccatcagattttgtgtcagtgtttggtaaactagcacttaaaatgtgtgttgaaactcctgtctgtaatttttttttgtaacgtaaaaaaaaaaacttatgagaaattgctaaactcttataagatttattattattatttttgtagagatggtgactcactatgttgcccaggctggtcttgaactcctagccttgagctatcctcgtgcttcgtaggtgtgagcaaccgtgtctggccaaaagatttttaaatgaacaacaacaacaacaaaaaacctaagagtaaaaaccagaatttgataaaaacagatatttcacatactcgttgcatcctcatggcattatcagttctggcattttgacttggaagaaaaattctaacatgaatttctgcttgaattctaacatgaattctgcttgttttcaaatactattcaattgggagtaactgtttgatgaaaagcgtagtacctaaacctcttctccttccacacacatttgtagtcttacatggtaaacctaaagtagctcagaaacatttactaaaacccatttacttggtaatagatttttcatttataaaaaaggagcttaagaatatgtaggctgggcatggtggctcacgcctgtaatcccagtacttcaggaggccaaggcgggtggatcacttgaggtcaggagttggagaccagcctggccaacatggcaaaaccctgtctctactaaaaatacagaaattagctgggtgtggtagtgtgcacctgtaatcccagctactctgaggctgaggcagtggaggctgaggcttgagcccgggaggcggagcttgcagtaagctgagatttttgccactgcactccagcctaggcgacagagcaagactccgtctcacacacaaaaaaggaatgtatcttagtgtacacctttcgaacgaccataaatgacatctcagtactatctagtacaaacagaattataaccctgccctttttaaagagtattggctttggagttgtaaagacctgaatttgaatactgattctgctactgaatatggtagaatcttgggcaaattcatctatctctccatcagtcaattatctatctatcaaatctatttttaattatagtaaaaaacagataagatttaccctcaactttttaaagtgtacagttcagtaatgttaaatatattcatattgttgtttcattaaaaaactttgaattttgaaataagttcaggccttcacttgaggttatgagtttgactccagcctggccaacatggcgaaactgcgtctctactaaaaatacaaaaattagttgggtgtggtggtgcacacctgtaatcccagctacttgggaggctgatgcaggagaattgcttgaacccaagagacagagattgcagtgagccgagatggcactgcagcaagactgcacagagtgaaggagactccaaaaaacaaagtaaaacaaaacaaaaataaaataagttcaggcttacacaagagtcagaaaaaaaaaatacaatgaattcctatatatcctttaaccagatttcccaaatgttaatgtttgccatgattgttcagtttttaaaatggagataaaattcaccattttcaagtgtatagtcactggtttttagtatactcacaaggctgtggaaccatcaacactatttagttctagaacgctttcgtcactccacagagaaactctatcctcaacagtaaatcctccattctccctccccagcccttagcatcttttactttttgacccactgttttctataaaataggtataataatatttatgctggagtgtttctgagatgacatatgtgaaaattcctagcatggtatctgtgtaatgcaagtgccaaacacccattcgtttctttttcctatcacagaaacagaaagtatcatacttatatctacatgaactattttggaaattctaatgccagcatcttttctaagtgaatttctcttactagtttggtaggtcaacagtttgcaagatactaaaaatcatagtggaggttcatatgttaaaataacataaggcaaagcagcttcaaaactccaaaaaatatgtgcattaaataatgtcttgcaggccgggtgtgtggctcacgcctgtaataccagcactttgggaggccgaggcaggtggatcatctgaggtcaggagttcgagaccagcctgaccaaaagtggtgaaaccctgtctctactaaaaatagaaaattagatggacgtggtagtgcatgcctgtaatcccagctacttgggaggctgaggcaggagaatcacttgaactcgggaggtggaggttgcagtaagctgagattgtgccattgcactccagcctgggcaacaagagtgaaactctgtctcaaaaaaaaaaaacaaatttgataataatgtcttgcagacataggcttcggaaatacatcttttgcaatgggcagtcatcatgcatgcagctcttttcatggattaatcttttattttgaagtattttatcttttttttcacgttttaagtgtttaaacattttcaaactttgtatttttgattttataagaaggcatggtgaataccacagtgcagtgaaaccactcaaggatcataagggttccattgttaacttaaatgacccacacagaccttatgccctggtttgattagcttttgatgatatgatggtttgattatggacatacagtttagccaggatatctacattttgaggaataattagttacagttctgatggcctcacaacatttttacaaatgttttctaagtatttatagtgtagtggaagtagcataggcagtgtaggtatagaaagcgtcggagtcctgagtttgaatcccaactatgctgtgggaagtttgacaagggacagaatttctttaagcctggatttcctcatttttaaatatggagggtaataactgtcattgcttagggttggaatgagaattcaataagacatagtttgggtaaggatcagcacagtgcctgacaaacaaaaactcattaaaacggtggatatctttcagatttgcttatgtgttgtttaaagaaaggactcttttgcccattaatttgtgacctttttatctgcctagaacattgcccatgaggtcatttctgcccgtgaagtagagaactacagtgttcaaatgtggaatcggaagaacaacgaaaatactaattaccctagctgagaggttatagtggtggaactggtgggatttcagtcaaaaaagctgattttgttagatacaatattatctacagttaggcctgtttattgtggagtggccaaaatatgttatggtatttaaagagtagtgaagatattttccaatctgagtgcatacatgtggtaacccttctctgatgagcagttgtaggctcatttgacattagaactgctgaaataactatgattgaaatgtttatttggtgtcaggtttataaacattgtacttggtttctgtggcaggtaacaagcataggaataccaattttacccagtcccttgacctggtaattcttttttgcttttggtatatcttaccatctaagttcttgagtcttagtgacaaaactgtatagtgtttgtcacagatgtgcgtatttggaaaggcatacaaccactgcagtatttttgccatcatgacattaaaggaaaaacacttgtgatagggtgaataaatacttctgagcagaagcaaaggtcaagctttagagtgaacttttgagtgacagctagtggcttaagggggagacgccatgttaactatgggcattcattaactgcgtggatatgaaatggcagtaagttctctccccttttatgccaggggcattggattctgtaaaagcaaaagggagaggagcgtatgtggctgccaaaatgagatggtaagaagttaaatgatcaggacacagagaaattaaggaatagtaaggtttagtgggtatgtgataaacattgcagataggctctgtggtatggaccagaaggcacaaggtctggatttttttctaacccagactctgtcactgactgcctgtttgatctttgtaacttctttggtacttctttagacctccttatctgaagttaaagatgtaaaacagtaaagatgtaaagagtaagttaaagatggaaaacaggtttcaactcttatcaatattgatagattggtaaaggctattgagaagagaatcctgcagctgtgtcttgcttgggtcattggaaggagttctgggattagtttagcagtttctggtgactgtcatggggtggtggtgggtgtgtgcttgcaggcatgcatgtttgtacgtaggtacatgcaccacaccgcattggttgactaatcatttgtaaaaatccttttcaattcagtctatatattggaaattacgtttttcttggctgtaaggttgagaggatcttctaatcagcctttaatttttctgactgaaagccagtgtacttctagttttgggagagaattacgtgctatagagctggatgcctaataggcatatagtgatggcgcctaagaaggaatgaaatcgttggtccgagagctagagagtgcgcagcgtgctttagacttgcatggggttctcttctaacctgcatatctgtgtgagtcaaacatagtaggtcctttcagataggtaatcatctaatgagccacagttaattaaatgtttatcattgcttaatatttggtatagggcattttatttctattctaggatagctttcaaaactagtaatttgggcagtattttagtactacatagaaggaagactggtacaaaatgggtgatggcgtgtaacttttaccgtattgatacatagcataatataaacatggcattaaaagatgcatagccttagcaacgagtgctagttatgattggttgagcagtattgaaagcaactaagattactttcagatatgtatattatatacaaactgttgcagaattattgcttcacttttaaggaaaagaatccttaagtttctagtgtcttttatctgagaaaattatccagaattgttaacagtttaatccactatgttggaaactctgttagaaacttttatgtatcagctctttctgcaaggaggaattattaagagctaacttctgttagctcacctctactgactagtgaaattagtagttttctttcacgtgtgttccttaagaaactgtatgtagcaaccacatttgtggcacacatagaccaatacaatagcctttttgtatttctttgtatctttctcaagtactattaatgttgtccttactgtgggtcaggagtcatgttttactcatgttggaatcacccaacctagcataagccacgcatacaataagtacactataaataatgttgaatccatagttgaaatacaattttacctaagagcaactgtgagctaccaggtgaagatcatgtctactttgaagtctaagttggggaatctgaaaacactggatttaccattatgcagttcatatgtggtagtgtgatgtgattctgtggtgatcagtttttacagtgacatccacagaactaaaacatttgaggtaacaactcgcatttcttttttttaacacggagtttcgctcttgttgtccaggctggagtgcaatggagtgctcttggctcactgcaacctccgcttctggggttcaagcgattctcctgcctcagcctcccgagtagctggaattataggcatgcgccaccacacccagctgattttgtattttttctttttagtagagatggggtttctccatgttggccaggctgatcttgaactcctgacctcaggtgatccgcccgccttggcctcccaaagtgctgggattgcaggtgtgagccaccatgcctggcctgctttgtttttcctgtaaaagtctatctagaattaaactgtcagtatgtatttgtacatggaaaaaaattccaaagaaacatttttggttaaaaatatgtggtaggttgaaacttgtgtacagtgtaaatatcgcattatgtatgccttatttaagtagacctaaatacctggtagcctgagccatcagacttgcatagctccaaagggcagtagtgatcttgttagggtttggcatctgaatgatctggttgccttttccttttggcgtttttataccaggtatcataaaatacagaaagcagagcaaaagtgaaagagtagaaaccctttgtttttttttttagacagagtttcactcttgttgcccaagctggagtgcaatggtatgatctcggctcactgcaacctccacctcctggaaaccctgagctttttaaatgttgaggcagagttgatagtaatagaaaagcagtagcttaggagccctaagaccaggctaatttgatagctctgaagttagggctcctcatctttgaaatggttcaagaatacctgtcttatataccttcagaggatcacagtgtgataacatgtttgaaagtacttcagataattctgaggttttatttatctcattctacaaatataatttgagaacctcctcttcaccagacatcgacttcgaggctggagatggaagaacttggcagtctaccaaggacttcccagtctggtagaattatggttttctttcttttttcttttcgggatggagtctcgcactgtcgcccaggctggagtgcagtggcgcgacctcagctctctgcaacctctgcctgcaaggttcaagtgattctcctgcctcagcgtcctgagtagctgggattacaggcgcctgccaccacgctcggctaatttttgtatttttagtagagacgggatttcactatgttggccaggctggtctcgaatgcctgacctggtgatccacctgccttggcctcccaaagtgctgggattacaggcatgagccaccaagcctggccagaattatggttttctaagattatgtttcatagtgtttcaggtttatattactgagatctttgttgtgggtccattttttgggttcaaaaacatgaaaagatagcattttgaaagtgttttgttacttctctatgcttataaaaatttgactcttagaacttacctatgtagtcccccacctgagataccaggacagtggggagagaatttatgatgtggtaaattttttttttggcagagccaaaatattgtaacatatgttgaaccaggtgtgtaagttgaataccttttagacatgtagttgtcactgttaatataagtggcctgctatcactcaatgctgtggacagcccaagggccttttctgaatcttttataagcaggaagtttaatttgcctatatatttttctttcttttttatttttttgaggttggttcttctaccaaaaactgaaaaaaaaagtattattagataatttttactttatgggatttgttagtcccagtctttgtagcaatttcactttaaaattcgtgattagcagaatgtcctcttcatttctgatgactttctgtggtgaggagggttcacttagaacctgggacaaatgagagttggttgagtaggatcaaacttaataagaatcaaggagacattaaatatattcttgaactggttttctaggattcttttttttttttttctcctgaaaggaagagctgggccaaagttttaaaaatcaagacaaactagaggtttcttcacattcatggccatattattgtttgggattctatttaattttcatatacccctttatgtttctaagaatatgtttctgatggtctactttatatatgcattcgtttgactccagctatagtaataattgattataccctaaaaaaacgacctctgattcttcatttaaatcagaacaaattgtttttgaaagcagcgccatgagaattaccttgaatgaccatagacttggcccacaaaggaaaggaaattatgaagaggaggaagccatgccgttggtcttcccaaatcctaatctgggaaccattagcaggaccgtcttgctgtgaggcacattcatagcgtgagaggcaatttctaaaactgctaaaatcaatccctgtaggcctttagagattaaactcactacctcgtgttataaccagatgaaaataattatgtactgcagcctgctgagtggggtgaaatagatttctagtgccaggattcttaactaggtgggatgggtgctgtgttttactgaagactccctgcagttgaaagatttatcctattagagcaagtctcaaactggtaagtctgggaaaaaacaattcaactttagacgccaattcttctaaaacctctttaacttaaatctgtttttcttggcaagagagttaaacctcatatttaaaataggataccagaactgtgccttgcacacaatagttttctgctagatagatattaagtacacgattttttattttttctgaaatgggagtcttgctctgttgcccaggctggagtgcagtggcgctatctctgctcactgcaacctccgcctcccaggttcaagtgattctccttgcctcagtctcccaagtagctgggactaaaggcatgtgccaccatgcctggctaatttttttgtatttttagtagggacagggtttcaccatgttggtcaggctggcctcgaactcctgacctcaaatgatctgcctgcctcggcctcccaaagtgctgggattacaggcatgagccaccatgcctggccaagtacacaatttttataaccacaaatgcagtgaggtttccttctctatcaaataaggataataatggtacctaactcatggggttgtagtggtgagaattagatgagtttactacatgtaaaatgattataaacatacttaacaaagaaaaatcaatgctattgattgaagatcaatcagttgttaaagtattaaactattttgacatgcagaaaagacgaataatgtttgctattatatgaagttgctgttcttaacatctcatctgtatgaattgtttctctatttgtgtggaaggacagtgttgatatttgcacaacactctgtaactcagttcttcttttgaacaatttgtgatactagaggaatgaagccactataagtgaatgaaactcgctgactagacttttcttaagtacccgtggatatccatgaccgactggatcccagtgaacactgaattctatgaaagaatagtaactagtcatacacaggggagactgctgaagatgtattaccctttgtagaattattaacatctcacttaaaaaaaaaagcaaaactaatatgcggagatgggggaatctgttttcatactgcactatctcttaatccatttatttaaaaactctttgttgagtgcttactatatataggacagacattatactagactctggggattcagtgatagagaaaaaagactaaaaatcacttacttgtagggagttcacaaatgggtgaggagaccggtattattagataatcaggcaaaaatgtaaaatgctaattgtggaaggcaaacattggcttcaagatgcatgtctcctgagtactctaaggaagtagcattgttttcttctttctacagaagagtgactgggcatagagaaggtagtggatttagctatggtcaggcagctggtaatagcaaggtctgacttatagtctgactctaagcctggtgcattttttgcttttctgcaactgtctgtcattgctaccaacacagggaaaggaggagtattaagtggctacagttttcaaaagtattgatctgtttttggagtgtttgaaataaatgaacattgaccccaacaagtggatttggggtttgcttccaaaaatctgtaacactgaattttttattagtatagttaagagtagaaattaaatactacaaatatcagaattattttgcttaagggattttttttttgactggccagtgatggtcaaagtttttttgagctttgagaccactcttcatttttcagatagaatattactcagaatccaaaaatacaaagcagtgaccaccaactggagtttgtggggtcagagaagatttctctgaagggttgtttgagctgagatctgaaggatgcagagaaattaactaggttgtctgagggcaaggtagagggtgctgagtattgcaaaaggactgaaggcctgagattagagagagcttgcttgggacattggaggtgtggacaggccattgtaattggttccgagagaacctagtagagtaatgctggtgagctggtatcagactgaagggaaggaaggggctaggaggccatgttaaggaccaagagttactactctaaatgaaatgaggaggttttaagcagggtttgagttcacatgattttcttgaagggcttgcttagccacccgtcattccctttggagtggtcttccttctggagtcagggacaccatttgtcttaagtgcagtagtaataattccttatggcaagtggccaaataaccagcaattcccagcatgtgaggcccccataatgggcctgcaaggacagtaacacttgaaaaacatcagagagaaaaaaaaattgctctttgcccttagtgaagtaaggctaaaggaaccataaaggaatatagtcaaccattactgctctgaggctaatgacctcgaagctcttggcttcccaagctagttttttttctcttccttcttggcatttcattgcttgagaaaactgttccaggaaatggaaaaagaatggagttcagactcaaagtgggtctttactttttgacgatcctggtaaaatgcttacagggacagaaggttgaaattgtcaagaagagtgtttttggatttgttaatcttggtcctctttgaaggcagagtgcttctaagagaagatcttattcatcgtctgatgaataggtcagttgtcacttgggaggagggagcgaaattggtggtggcaagagaagggtggatttgtaggaagcatatcactttcctgagggttttgttctaattcttctccagatacaaataaacgcaacattgggtgaattgatttacttctgtaagactgattcctggactgtaataagaaggaatttgggtagggcgggggggcttacacctgtaatcccagcactttgggaggtcaaggcaggcggatcaccaggtcaagagattgagactatcctggccaacatggtgaaacctcgtctctactaaaaatagaaaaattagctggttatggtggtgcgtgcctgtagtcccagctactcggcaggctgaggcaggagaatcgcttgaacccagtgggcgggggttgcagtaagccgagatcgcgccactgcactccggcctggtgacagagcgagactccatctcaaaaaaagaaaaaaaaaaggaatttggattcagggacttttctcaggttttgttcagctcttaccactttgttctccttctacctctaaatgctatatggaaaaatatgtattttgggaattaacgtgctgtatgttttgtcttgaggatttcacagacccttgagagaatattctgtgtttattatagaacttgggttcggattcgttgattcacttgttttacagtcaggacacgagtggggtggaggtcttcagaaattaatgtcatctattgcctacactgatgacatgatagtaagcagatcaagtcttgtagctatgttcttgaaaggaactcttctaggcctctaaaactgggcaaaacatattgtgttctctgttctgtttcacagattgcctggttttctctggaattctgtgcttcatggcttcttttcccttgataacatgacacatgactgatgacgtcaaagaaccttctagattttctcttctactggtatttaactacatgtaatagtttcatatttttcctttgaagactaccttgtagttttaataagggcgcatgaatgaaacctactaaatggaccgttgaaatatcctacatccaggaagctgcattgcagtattttactcatagccagctggaattctaatagattggcttgctgattgtcctattagtttttgttttgttttgcttgaggattcaacttttctggctttctttaacttcatagttatggctggtctgtaaacctgtagataaggtcaaaaaattatgggtaaactcttcaaagtttcctagatcttggttgataggagtgcaaatctaatagcctgtgcatgttataaccattgccattatttgctcagtggagtaaaacagaaaagcattagggagagtctctatggagcttgatgcaattggtgtgacattgtctaagaaaagttggtggcttgaggaaccataacccaggagcacttgattgagtttttaaaacacacagtagattaaggacagaagtgtgtcgagttcaaccaccaaatctgttcatatgggtatcttataactcttggaacttgaatacttcctatgctgactccaggtttaatttcattctaaccttgtgatgctgttaataaccaacattgcaccacccccaaaaagcccaaaaaacaaacaagaaaacctctcactgaaaaaccattattttgaatttgacatgagagtcaacgcattatttgccatttttctcataaaagttagctgcaagttctgtttaagaaattttaaataagtaaatgtcacacaagtgaatacagatatattccagttctttgaatatacgtgaactctttacttattggttgaatgccaagatcaaggtgaatgaaaatggtcattgaagctcatccatcttttagacatttggcacttcattgtgcaaatgtgcacattgataattttggcttaaatgtttggcattttatttggaaatctgttagcccctttgaagtcttttaatttgggagtggaggtagattagactggaataataataaagtaggctctgcaaataattgcaaatacacagattatttcttttttgtaggttgccaacagattttatatattggaccttgacactgattgttttaggttgtctaacttgtcaggaagtacagtttctgttacgaggaaataatgacgttttcgttgagaggatgaaacattttccacgaccatgaatctgttactggcttcattcagccagctgccagtggaatccaatttctagaaggcagaagcagtgccattcacccttgctattctttcattcctcaaattttaagtctttcagcctccaagaatccttagggtattcctctgccaggttaaatgtgtgaattacagagtaaagagtaagttgaagatttcttccatttcctgctctcaaataataatttttcatgtttttcttttttctgtttccctttggtgatctactttcagaatctgagtcactaaatgagttttatcaaaggagaaaaatgtacttagatacttagaaatggaaacaagatttgtaagttggcaatcaccttgaatgaaaatacagttggccttctgtatccatggtttctgcgcccgcagattcaaccaaccgtggatcaaaaataatgcgaaaaaatccagaaaatgttacatcgttgctgatgtttcagtatagaatattttcttgtcattactgcctacacagtatagtatatcaaatatttacgtagcatttacattgtattagtaatctagggatgatttcaagtataagaggatgtgtgtaggttatatgcaaatgctacaccaatttttaagggatttgagcgttcgaagattttgctatcctcagagggacctgcaaccattccgtaccaccctgatactgagggacagctatactaggtgaatactgccttgccttagccaagctgataactgtgtatgttatagagataattgccctccaatgcagttttgttttttgtttataccatgttggaaaaccgttagatattttattgaaatataattgtgtggagtttttgaaagaaaatatggaatatgttgtttcaaaagcttttcacatagattgtaaatttctttacagaccttctaggcttttcacagatataagcatttatagcagaaatgtagtgaatatttttatacatagtctctaaaacttaagtaaggcccattctacaaatgattggagtagaaataggcattaaaatgtggtggattcatgcacaagtaggtggtttgtgtcctatagtgtgaatatagtgttttctattttctttaggggggcatttctgttcccctggggaaataaacttcctatttatttttcttaagtatttttaagcttggttacttatttttttaagtaatccctgccactgtttatatgtagaacccaagtagcatttgtagttgaattttgtacattaaaaatattttgatcagcaaatatttaacaagtgcctactgtgcgttaagatgtttgtagaattgccgttttgtttgtgaatgttagcactgggcatagatctaaatcctcctctttgcaaacacccctgagaataggaactaaggtgagaatgtgttttggcctatatcgtgttttctagtcatttctatgtattttattagaaaaatatttttaaaaaatgttttgggttagggaaccaacccacttgtccaacttgtgaaagtctgcggaacaccaccaccatcaaaaaagacaacatattcggatcaggaatgtaatcacccagtcacctaataaaaagagtgcttgagtatgcatatggaacaaaaaagcaaaaccattcatttggtaaagggtgagtaggggccaggagacagccctaccctgaagatagaatgctttaaaaacatgttgccattaatatttaagacagaaagcgttttgagcccgctcctctcttctacccttcctcagcattcatgttgtagtttgctccctaatgctcacaagtccgtgccagacggaaattcgcagaggccgctgcagtcccgcagaggccactcaggggagggacgcgggcggaacagtcgcgctcagtcctcccaggccgccccaggccccaggtcccctggtgcctcgtgccggctcctggctcgcctcccttctgctctgcccagcccaccccgccgcccccctgctcacacatgcggcctctcccccgcgccccagcctctggagtcgcttcggggccatctagtcatacgctgtccatcagatgtgtttacttttttcctgacagccgacacatctggagcacatattcaggttattccagtgccactagacacattccacaagatcatttcagcggttgttatggcgatcttcctccctccagtgattttcaagttgcatgacagaaatagctggagctaaccagggggacaaaagtcaacgggatcaggaagggcttctttcacagaatgaactaattagtgaccctgctttcttcacagggcaatgagcatatggtttaataaagtgagtctgtgacactttttttttctctgtaggcaaagctgtcactggctgaaaactttcctgtttttactggtgggaccgtagtctgctgtctttcaacagagtttacttcacaagtagaaaatgtttgctcctgagagttaagcttcagaacgtattcttggcttcatactacctaactatagcaggtcctgtaacttaaagagacagtattaattttatattcatttcatgggaagggtttatgcttactcaagactaagcattttcagttagggttttgtaagtattatgaattgatacctggaagttcaggtaaatataatgtgttgtttgctgtggtttttctataaaatataatcagtatttctcactggattagttacaaatttatttgaacctgtgatttttttttgggcacagttatagaatattttggtattaaaagatttgattaagctactccatttttatcacattttaagtagcatgcagatgtctggttatgtctgtcaatttttttcctgaggtactttttacattttgtgtaggattttggatgactttatagtgtgaacatatcattgcagacatggaaatttagacctgagatcatttagtgttagtagtagaaatactgctttcagtttataatggatatataaggtaattctataaagcactgccatctttgatcactttatgaagaatacagacatgcctcaataaatgttttttggatgaatgggcatatcatatggattcaaacaaaatacatgttgccattaatcatgagtctgagatttataaattataggggcccattttcttttttgtttttgtattcctgtactgtaattcagtcttgaaaaatgtagccagctatacatgtttcacacttcttcccatatgtaccatgatactcttttacacacgtgtgcacatagaatctcttaatctccttttcttgttctttcaccagtactcacaaattccactcctttgcacgcaccccatttttaggttgagacccaatgcacttaagtcaccatgaacaacaaagtttatagttttcctttttgatcgaattactcatgtgttgactgagttctccggattctaggaatatgacaatgagtgacaagtaggagaatcagagctggactcacccaagcaattgtcttcatctttctccatcagtacaatacctctttcctccactctcagtcaaattcctgttcagtgggtcccactgaggctggtcgcagctgctctggagtacctgctctcaggaagactagaagaacactgaaaggtcacataattacatgtgaatttaattcacagagacctgcttgtcgcttttccatgtgtttctcctagttacacattattaactgtggtgccttgtagggcttcaattacttgggcaaatatgtatcgtgcagagactgagcacaagttagaatgctgagagtggttataaaattatgttttcctctccagatgtaactttacagtaattaaacctaatgcaatgtaagcattatagtcagtgctgtggtagctatctccaagtctaattggtaacatcgcttaaatcatagcacttattgctggttatctgggaactggaataaaccaaaaaagttacatacattaacctttggtttttctgcatcaggtgaagtggatagcttgtcccttcatcaaaatctgtcatctgtattatatggaattttgatagcatttagaaaatttttttcttatttagatagctctgtgtattcatccatccatcgatcatccatccatccatctatccatccatcatttcatctgtctttaggctattttccatagtttgttgccctggatttggagacttgatccagcacagagctattgtccacttgggttattggggtttccctttctaagtagatgatcaaaatccatggtgaaaacatgcttgccttccataaagggctacttgtttactatatttcagtcatttttctgccaaaagtaaaaagtaaaagagtccaaaagatagaaaagaatctcaagtttaaaattttcttttgcatttattatacccaagaatatggcaagcagcttaatttaatcaagcagcaagagtgccagacagttttcctgcatgtgagagctaaataaatagtggacctccgtatggcagtgataatcgcaacttagagggttttctcagttgtgaaatgtttgtgttaaggatgacttttttgttgtttttgttacagtctgacagctgaagatgcttttaaaaccttctagttacttagagcagagctatatggcacaggcttggtggttctaaaaggcaggtcctatccatcacagaaacagcaagtctctgggttatgggggaagattgagcgggggggagtgaagtaaggagaaaggggggctgttgtgtccagtttacatttgtcaccagtgactagcttttaaaaaatgtgttagctgtgcatggtggtaagtaagatccagctgcaggggattatggctttgagtgggtcggggagcttggaatgcattcagttccatcaggggatttgtgtccctcgtcatcagccttaacattgctaacacagtaaagattaggaacagaccagtgtcacctgccctgaactttgaaaaaccctggaaccattaaacaaaggggtttgctagtttagaaagtgtcccttctctctgtccaaagtgtttttcaaatgacacatgcaaaaaaaaaatacagttatgctcaggtgaaagactgtctgtggttgaactattttcacaatttaatgaacatgtcacaatcataatttctaatgaaaaacaccttccacaaataacgttcagttaatgaacatttttgtgaagtgatttccaaatcaaaatgaagagccagtagttaggagggaatgtttctgagctttagtctcactccataggagaaaaagattttgcttggtttgggtgaccctcccctcctcctcctccccaggaagaaagttaagagaacaccacaaaggtttacttttttcagggattttgaaattcagcatacatgccagcaagcagtttagaggcaggaagtcttttctagtagtgcagtcatgaactggtaaactagaagcatctgtaaaaatttagagggaatatcagctttctcaaagctccagcccaagtgtaatgaggtgcaaatgatagcactgcataacccttccccaccccaattgtggaatgagatattgagacaaaaataaagaggagaatagggatttcagaactctactgtactgaaataaattttgattttcagatgaaatggcttttgggtgactaaggatagccccaactttgacggttgatgagtagaaaataaatgattttcagctcagcatctctaggtaccatctttgaaaagtggttgcatttgggctgtgagtgcataaatgacatacctcctcattcggctgagtaaattaacgagaatttttagtataaagtaaacttccactgattcgtatctttggcaggcacctctctctttacagaaagaaaaaaaaaagaggggtaagaaaaaagatgtgatttgtttgaaggaacacatctggggtgtgatctgctatatcttaacaccagatggcaggtttaggctgacaactaaacccagtttagcctggtcaaaccgtatcttcgtatgtccttttccccctcccctcccaaacaatctatgcacaggaagtagaacaattatttgcactccaggctaacagtcctcttgtatctgtggctttgggttctctttcactgtgcctctgctgtttatagacaagtttggcttcccttggcaacccctgaaacaggttccctctgtggctcatacttttttcagaggtatgttttgtcgaggcagaggtgtggtgcctttaggtggctggtgcttgtcatgacaggcatggcattagctgggcctagcagtgactagaagtgacagcattggttcgaggtgcctgggggcctctcagtcatcactcctgctggagcattgagaatatgaaagcacctgagagcaccactgcttatcaaggagataacagtttgggagaacagggccaggaggtgactgaggacaggcaagtgcctttccctccctttattttcttgtagtagattttacttgaaagagtgtcatatatgtggcctttagaaagaaggcatacaaacaagctttgtccagggccacaaaagaagggacctttgaatttccagaagtttcaagtcttttaatttctgtcattagacttacagtttctttgtgtgttgtatcataaaatgaccaaacattaaaaaaccaaccaaaaaaaaccctttaacacttcagggaaaagagtcaataaatagtatattatcctcctcactgtcgttagacacattacctccttagtgataatggtagcggtcacagcctatttttatgactgattatcaaaggaccatgtcagaagtttcttatcactcctaaccattgggttcctttgtagattttccaggaattagttttagattctcactactgattaatggacatatgtgtaatctatgcaaagagctacaaaatgtattcattaatccattctacaaactaagattaattataattgtctgtaggcatcttataaggtcacaattctaatataatttgataggagctgttagggatttgaatgaaatttcaaaatcacctccacagagaaggaaaaagacctttagagaaagtcagtgaatgtttttattgggcagagcttgaagttacttcctgagatttctcttctttcatagttctgctttctgggtagtcaaagatcacctgtttaaaaaagaaataattcctggataccaaatgttactatagttatcaacatgaaggcaatcaaaatttttctgagtagattttaaattgtttttgttaagttacacatttcagttgtaattcttttttttttttttgaaacaggatctcactctgttgcccaggctagagtgcagtggtgtgatctcagctcactgcaacctctgcctcccaggctcaagcgatcctcctatctcagcctctcaggtagctgggaacacagggacatgccaccacacctggctaattttttaattttttttttttttttttgtagagacaggatctcactatgttactcaggctggtcttgaactcctgagctcaagtgatcctcccaccttggcctcccaaagtacatgagccactgtgcttggcctggcaggtgtaattcttacatgtcactatagaactattttatatataatgtttgacctataaacttttctacttgctattttagaaaaagaatttgttggttagaaagtcactgaagagagtttaataagagtactgtttgttttttaataaactatttactgtggttcttgtaaataaaacaaagcaacttagttaattctattcaggaaacttagctcaatttcctagtatgaagaagactgatttgatagcttggagtagtagagacctaatatggtttcaatcattgtgtggaggaggacattacattgatgagacaaaaccattttctaggttcttgaaactacttgaccaattacagtaatttgaagggggcacttcctaaataatattaagttcaattcatagtatgaacttttgagttcaaggcttctgtaatttttcttggcttaaaaaaatattcaaatttatagaatagtaatgatgttggaacgtttgattagattttagtgttccacatagttgactataataatttctgaactacaatagtttcagctagaatatttccatttattcaacaccacattaatctttacttacttgtcacacagcttttaaaaaaatctgatgtgaatttgctttattgcatttgacacgtttgggcaaatgacaacaactttggtgtttttaaaatgttccagttccagaaatcagccttcaataagcttcaggcagtttcccagtaagttgttaatggattgccatctttctgcctctcttttaaattttttccttaaaggccatactgggggaaactaactagttcactctagatggctgtactaaccctactttaaataccactgagagtttaaaaggctgcgtttttgcatctagactcacttggatttgaataactgatctctgaccgtgggcaagtctcttaacttctgtgtcttgatttcttctatttaaaaagaaaggcctattttaggtatgtattagggtaataggaggtaatgttagaaaacagagtctagtatgaagcctaatatatagtagaggagggtacaatacttaataattactgttgttataacctcttcctccccgcagcctgcgcctcccaggctcaaacaattctcctgcctcagcttcctgagtagctgggattacgggcatgtcactactaccccagctttttttttttttttttttttttttgagatggagtctggctctgtcgcccagggtggagtgcagtggcgcgatctcggctcactgcaggctccgctttccgggttcatgccattctcctgcttcagcctcccgagtagctgggactccaggcgcccgccaccgcacctggctaactttttgtatttttagtagagacagggtttcaccgtgttagccaggatggtctcgatctcctgacctcgtgatccgtccgccttggccttccagaatgctgggattacaggcattacccaccgtgcccagccccacctggctaatttttgtatttttagtagagatgaggtttcaccatgttggcccagctggtcttgaactcctgacctcaaatgatccatctgcctcagcctccccaaagtgctgggattacaggcatgagccaccacgccctgctgggttcttcttaattataatactctttcccaagctccttgcaacttctacagtttagcctgatatgttgtaacctcttgctgtttacactgtccactcttgtggaggtagctaagacactgactgccagggcatgttttatagtcatataaaatctgtacaaaagaaagttaattttcattcaagaagccaatagcttctggatcattgccttgcattggaaataatttttttttctctgtagataaaaggtaagcattattaagttattaaagcaaacaaataactgtagtcatcctgccactccaagaacaacaggatctagagtataaaagtaatatcaaaatttcagaggcctgcagaccctgttgctgtttatcactttatcattctatttcctccttgaatcctttttttttctttttttttttttgagacggagttttgttcttgttgcccaggccgtattgcaatggcgtgatcttggctcactgcaacctccgcctcctgggttgaagtgattctcctgcctcagcctcccgagtagctgggattacaggtgcgtgccaccacacctggctaatttttgtatttttagtagagatggggtttcaccatgttggccaggctggtctcgaattcctggcctcaagtgatccacccgcctcggcctcccaacgttctgggattacagtgctcctgcctcggcctcccaaagttctgggattacactgcgcctggcctacttgaatccttttaagccatcattgccctggttaggggttttcccattgctgtttgattttcagattcattaattgaatactaatccactttaaacttttagtgttttttttttttccctttatacacttggcctgtttcattttaatgttgaacagttgtttgtcaacttcaaaaaagaccacttgtttatataacatgatctctatttgtgagaaatatttttcctctaggaccgtagtaaccttactgagtcttaatattcagatatcatcagtatggaataaaatatgacatgctctgagagtaacaagcttcccacttgggaagtaccttttcctggtggcttttaatgagaggaaaggcatagttatttaagcctggttgtggagctgaataaacctatcatttgaatcttggttcttctgcttcctagcaatataacctttggcaaaaccttttacttctctgggccttattattgctttttttttttggaacgaaattttgctcttgttgcccaggctggagcgcaatggtgcgatctcggctcactgcaacctctgcctccttggttcaagagattcttctgcctcagcctcctgagtagctgggattacaggcacctgccaccacgcccagctaatttttgtatatttggtagagacggggtttcaccatgttgaccagggtggtcttgaacttctgaccttaggtgatccacctgcctcggcctcccaaagtgctgagattacagatgtgagcgaccacgcccagcccttttttttttttttttttttgagacagtctcactctgttgcccaggctagagtgcagtggcatgatctcggctcactgcagcctctgcctcctgggcacaagcgattctcctgcctcagcctcctgagtagctgggattacaggcacccaccatcacgcctagctaatttttgtatttttagtagagctggggtttcaccatgttggccaggctggacttgaactcctgacctgaagtgatcctcctgccttgccctcccagagtactggaattgtaggcatgagccactacacctggcctattgccatttttagagataaaaaaaaaatacatatctcacagagttgtggaaattaaatgagatgatattttcagagtgcttggtatgggtacctactggcatgaaacataaaggtagtcttaatagtatatgatcttttgaatttctgtggatattggtttggactgcatatttctttttttttgagaaggaatcttgctctgtcacccagtctggagtgcagtggcatgatctcagctcactgcaacctccacctcctgggttgaagtgattctgctgcctcctgagtagctggaattacaggcacacaccaccacacctggctaatttttgtatttttagtagagacgtggtttcaccatgttggccaggctggtctcgaactccagacctcaggtgatccacccagcttggccttccagtgtgctgggattacaggcatgagccattgtgcccagcctggactgcatatttcttattaatgattccttttatgcttgctgacattagggcatcatttctgctgctatggtagactttattaaaaacgatgacacatttccaactagtattttttaaatagaaatggatacaccataatcttatacctgaattaataaaatctgtcaaataccatctctactatttgcttttttctttgaccgtttgttgtacagacagcttataggttttgtttgtttgtttaaatacagatgcagagggttgacttcacctcacttcttaattcatgactcagttttgtcattggttcatgcaatgtccctcttttgttcactaatttttgttagattacttgtttgattttctgatggggataagagatgaagggacttttttttattgccaaggttctgaggtccagtgaagccagagtatattgttaagataggatgtaagaaatggaagagatctgcagtattctctagctaaagtacttcttaaccgctttaaaaaatgcctcactcctttaaatgaattttttttaaaaattcattccaggcactgtggcacgtgcctgtaacctcagctacttgggtggttgaggtgggaggctcacttgattccaggagtttgagaccagcctgggcaacttagtgagacctcatctcaaaacaacaacagtaaaaactagttcagactcttctccattaaaattcatagatctagtctgaacttttttgatgcttgagaaaactgagactcagataaaagacacagtaataatcaccataataatggccatcactttttgaccatttattatgaatcatgagctccttgcctgtgatcgaaatgtcatctctagagacacttaagctcatgcagctcattgtggacttccattttggtattctctttaaacttccaaaccggttctctctcccttcccttcgtttttgggtttaatttttttttgagacggagtctcgctttgttgcccaggctggagtgcagtggcgccatgtcggctcactacaagctccgcctccaaggttcacgccattctcctgcctcagcctcccaagtagctgggactacaggcgcccgccaactcgcccggctaattttttgtatttttagtagagacggggtttcaccgtgttacccaggatggtcttgatttcctgacctcgtgatctgcccacctccgcctcccaaagtgctgggattacaggcgtgagccaccgtgcccggcctaaattttttttaatttttattttatagttgcagttgcaggcttgccatttttgcttgcaatttcacattgtattaattttggtccatctccagcctcttccccagtcctgccttttctatgacattttagcttggcattagactaacaacacaaacaatgcttatgaaccatgcttgcatcaaatgaatgagatgagtacattgtcatattgcttcctttttgagaaaatttgctttcaatccctgaccctaaaacataaaagtaaatcaaatttcaagacggcagacattaaagaaaatatatgccaagtgtcccaagcagtgcctggcacacactgaaaactcagtaaatgcttattgagtgactaaaagtctccagtatgagcaaaagctgtaaatcctggatctacttctgttgctggcctagttctttctgatttgtttaaggcacgttaaaccatactctggcaagggagaggaatgaaggagtatttgagaaacaccttcagtgtgccagatgctttcatcaatactgctcagtttatctccacatcagccttgtgggtttatgcctcttcaccttttttattttttgaatgaagaaatgggaactcagtttaaacagattgtccaagatgtttgaatttgaattgggatctttctgactctagacccttatattttccagacatccatagcagtataagaaatgattaattgctgttactatttttaattgccatcatgatcatcatcattatcacctttagattttacaaagttgtcctcaaatggcagcctgttgcctctaaaaagggtgggacattactttgcgaggagaggagaacattaatggttcaggcagcagtgtttctagatcctcttattccttacagcacaaatctacaccagtctcttgtgtgtgtatgcaaatggctacctgagtaagggtgtttgttacctgagatcccttccagctactcaagtcaaagagatttttaagttggaatcagagtgttctgcctatgtaattttgatattttagatggaaaagtgagctggaatgcaggaaggttttcctaaatggaaaggcggctgcctcttcaccctctccactttctttttctttgtcagttgctggagagagatggccagtgacacaaaagtccttctaaactttggggagtcctagatggctggcagatgagatcacttgattccagtgaaacctaccagctgccttaaattcactcttccagagcaccatactttttattactagattgaattataggataagaaaagtgctttgagcatctttagaccgcacatgtaagactacatacttgggcctgagcctcccagtttggagtagggcctcttaaggaaaaaagaaaaagcacacgttatccatgtttgtgtgtgtgtattgtgtcctgtttgcccttgagattaattttttaacaagtgccgtgatttcccagtttttcttagattatatttctaattgctttaatattagatttgccatttatttcacctatccttgttttcccttgactttttaaaatctgctgtcattgttatactttgtatatcttttttatggaaggcagcagaaaaatttggaggtttgtctagaacaaactcagttcagtcaagggaaggctgcccagcttggtatttaacagcgcagaactggcctgtgtttgtattctctactgaagagagcgtgcacacctacatgcccctgcattgagcttcgtttccttcatcttgaagtggtggtgtgaagaacactcagatttcccacataaatcaggaaagagggttcatcagaatcaacactggttaaaaagaggtcttaatggaagtgcctaagtattgtccaaacacgggggataaatgtgttctgctttacttggccagaacaatgtctcaagctagtgattaggctttactccagctttaacctcaggcaaaatttatgcagctctgctaccgtttgtcaggtaattaaagggaaaaaagggaaatgtttgcttaaagtagaagtgttttttaattaaacatgaaaaataataaataaacacaaggggcaaataggcagttgggaaattgtttttaactttccagttaaaacatgaagaacttcaagcaaaagaccaatattttaggcatggctggtagtttattccttacagagcattattcagctgtgctagaaatccaaatttgagattgttccatctttgtgtcgaagaatgtaaggcatagttactctgtcttacttgaaagataatgccccttaccagtttttgctaaccactaactatttacttggtaggagaagagttcttcaaagtcagaacctgatagaaagccaataaatagtagtacaaatcttgatgtgggaagcacagatatagcaggaagtttaggctaaaaagaaagggggaaataacctcttccctattatggttaaccagagtattagttggattgtgttatgtccaaaatttatgttaatggatccgccactcatcaccaaaggctgaactctatcatcattgacttatctttagatcccagatcttagggattctgcatctatataccctcattcttacctgctatattaaagttgactgtgaccattgcagttgcctgcctcaactctttgaatagtagtatccttacaaacattccatatctaatctctcctactgctgtccatccttcctgttgctgccagggagattttacctaaagctcagttttgatcatgctactaatcttttcaaactttgcacagcgtttgagttttccatgccatggtccttagacagcttaccatatctgatctatgtttaccctacactccagctgtacttaatctagtttagctgttctttcaacacaatgcagggctcttttcctctatctccttgactttgcttttggagtgctttattctacacttcttaattaagtcctttaatttgggcagctgcttttcaaaggctggtcaaacgagtgtaagtcttgctgattatatatcattattatataatttcctagggtcttccttataatttcttttcatggtagcttattccttacactgaatatttatactttgagggtttgggggtggcaagttagagataatcatctgaagtgtttgtttccttggagatcataaggtaaagtgaataacattatctctcttgagtgtcttagaactaatagggaagaaaaaagcacttgtcaatcccaatggacagatgtgatttatcttggtatgtctttgagaggtagaatcaccataatgtataggagcccccctagatatttggtgggtgtggcatttggcacattatgttgaatttccctgcttctcttcccaacagtaatccttgagccattttttgttgtttgaacagtatctagctgatatctgttatctcaaacattgccatttagtggtggtcatctgtttacccataaggtgaaatgttactgaggacacttccaaaggtagtttaactgtgatctctttgtttgggtttgcatgcatttctgaatatataaatacaaacttggataatttaggggtaattacctatattagcaaatagtggtttatgaaaggagtaaaatttcttttaaatagtaaggcttctctaggccctttgaatatttgagttgcaaaatactgatcacaacctgaaggaaaacgtctgttgtataaagctaaacatatctatatatctatgccaataaagacatattgagtgcctagatatatgaaagggagagtgtgtgtgtatgtgtgtgtccctgtgtgcactcacgtgctggcccaccaactatataaatatgtaccctcctgtattctttaccttatagacaaggcaaaaacatttatcattgctcttgcctggagttatgtccaccttcatcttactgcaagtgtcagagcaacctacaaaatagtagatgaggagatgaaacaagtagggccagaaaacattgtccacagcccagtggtccgtgtcaccattcttctgcttctagcatatattgcataatcaggacagacgagacaagccaaatccttttagtacaccgtgtctggggaggttatggagtctcagagattagttgtcattttaacagtctcgattgtgacaagatcttggaagtcatctgagaatgtcatgaaaaccatattcccattgcttttatttctgctggacacttactgggtggggaacatgtttgatatatataaaacaaaaacaaaaaaacaaaaaaccaaccaagtgaaaaacctatgttctttgcattgaggtcacattaagaatacctcctcttctacaattcaaccaaagctcttgcaagaaaatgagtttgctttatttgtatttataatgaatcattgtaattgcagctagaagctttgtagttatgattattcatcccctctttccattctcacagaaatgtcaggttcaggatagatttttaagactctaaaaataatggttttttggctgggcgcggtggctcacgcctgtaatcccggcactttgggaggctgaggtgggcggatcatgaggtcaggcgatcgagtccatcctggctaacacggtgaaaccccgtctctactaaaaatacaaaaaattagccgggcgtagtggcgggcgcctgtagtcccagctactcgggaggctgaggcaggagaatggcgtgaacccgggaggtggagcttgcagtgagccgagatcgcaccactgcactccagcctgggcgacagagccagactccgtctcaaaacaaaaaaaaaaaatggtttttctgcttgcttccgttatggtaatgttgtgggtatatagacctttaggagtttttcttctttttgagacggagtctcgctctgtccgaggctggagtgcagtggcgccatctcagctcactgcaacctcggcctacagggttccagtgattctcctgcctcagccttccaagtagctggggcgtcaccacgcccggctaatttttgtatttttagtagagacagggtttcaccatgttggccaggctggtctccaactcttgacctcaggtaatccgcccacctcggcctcctaaagtgctgggattacagacgtgagccaccgcgcccggccaggaatttttctattttgaaaatttatattgtttttcttgaggtaaccagagacactaaaatatactactaagtgtgtgttttgttagtattgtttttgtcctgttaattagcagttttatttttattttatttttgttgcttaacatttttcagaagttatagctaaacgtattttgaatgaatccaactggaatgttagtttttaaaaataaattttgtttcaacctgtgcagctgtagtttactttccaggcatgagaaatatctattttattaagtcctatgaggaatatgtgtcacacacatttaagaaaaaactgtttaagatgaaacactccaaaaatgacttccccctggtgtgaagtaaaacaaaagcctcaattgcatctctgcctgtggtaatgacacgaggtgacaaactgcaggcaggtgaggtttgtggggatgatctcacacctgcacctcgagcttggggaacagatgggtttggagctggcgtctggccttgctttctttttgatacgagaccagctctcaggctgggagcccccacatttgcacagaagactcccaagtgttttaacataggcagatgggactgctggtggataatattccctggttttgtgaatctttttcttgggatggagaggtgaagaagccccagcgcaagcaccaccaacctccaagcccagagcccttacatcaagccagagctttgcctgccaggcaggtttcacttcagaaacccagagactgaggatctgtgccctcttcagtcttagttctgtagccaggcaggtagcaaaaggtgaacccagttgaagggttccttccctgccagtccctgcttcattcccctgcagctgatcagcagaactctggaagcagttaaggctggaaaaccttgtgggcaggcagagctctttctgcagtagcactcagagatgacttctgattaattctttttcacacctccctaaagaaatcaggtatgtatacctctgaagggaaggtcaaggtagatttctgtttgagacctccgctgcatcatctaacccaactcaagacagctttgtagaaaccatcaggcccaccaatgttttactgctttgcccccttcactaaggccattcactaggggctcttcttttcctttcaacactagtgttgtcttggcaaatgcgtttttggagtgcctccacatgcatagcttcccagggacattttgcagaaaggtttgcactcctttcttaagagcagttctgctgcctcatttctgtttacatatgtactgaatagtcagtccatgtctagccttcacatgggtttgattttccctgtacactgtttttttttttttttttttttttgagatggagtttcactcttgttgcccaggctggagtgcaatggctcgatctcggctcaccgcaacctccgtctccctggttcaagtgattctcctgcctcagcctcctgagtagctggcattacaggtgcccgccactatgcctggccaatttttggtatttttagtagagatggggtttcaccatgttggccaggcttgtcttgaactcctgacctcacatgatccacccgcgttggcctcccaaagttctgggattacaggcgtgagccaccgtgcctggccccctatacactgtggtttttttggttttttttttttttggtcttttgagacgaagtctcgctctgttgcccaggctggagtgcagtggcacgatcttggctcactgcaagctccgcctcccgggttcatgccattctcctgcctcagcctcagtcccagagtagctgggactacaggcgcccgccaccatgcctggctaattttttgtatttttagtagagacggggtttcactgtgttagccaggatggtcttgatctcctgaccttgagatctgcccgcctcagcctcccaaattgctgggattacaggcgtgagccactgcgctggcccctgtacactgttttaaaagagttcgagccccttttaaaaaaaatttggggagatttcatatgacagctcagagttctggtttctcttgaaaaagagaaggatgatctagcaactggagggtctagcaacaccttgtctacattcccatggaactctgaggtagggtatctggctagcggcttttctctttggatcactggctttaagcatttttgacatagacatgtgcatgaacttatccttactatgtgtgatgcattttgttcagtttcatttaagcacaaatggttaagagccactaaaatgattttcaccatccaccaatgcctgtgacctgcagtttgagaagcagtgcttgggatttggctgcagggtctgcttgccagggccttccccatgaatgtgcatcactgcttaactcctggcctgcagcggcagcatctggtttcacagactcattgtcattgtcattcacatgaggtaaacaaacagctctgtgggacgcctagcctgtagcccctatttaggctgtgggtatccaggtgaggactggtcttttcacgactccttggttttgcaaggctgaagacaaaggcagagtgaatgcctgtcttgtgtctcacctcagcttctagccccacccctgccaaggtaaatgaacggggagaaaatatgctgtcttgtggaagactacactaagcctgtcctatggattgcataacagtgggccctagtagacaggtcagggacaattcatattataatgatattctttttataaagcaaagcaagtttttaaccataagttaccttagtggctttacatttgcattacagatttttaagtactgtcattaattgagatgggtcagtaggcagggggcagaaaaagactaaagagcttctttaatcatacctttgcattttatcatcctagaggggaggcagagaagcctcttactcatcaggaccatcaatggaccatggccatcaaagcattgattaggaaagatgaagcatctttttatacaatttaaataatacattcttattcagccattcaaattttattcctttatcatatagaaagaactcagaattttgagtcagaagatgtggcttcttgttctgggcacactgttttctttttttgtgtttttgagacagagtcttgcactgtcgccaggctggagtgcagtggtgtgctctcagctcactgcatcctctgcttgcagagttcaagcaatcctgctgcctcagcctcccgagtagctgggactacaggcacgcgccaccacacccagctaatactcagtacattacaacgcattcggtcttggttcaggagactcctgaattgctgtgcattgagtttttaggaagggaattcagcaggtacaccctcgtttgacctattgaaagctggtgtggaaataaaagtatcacatatttatttgcataagtctgtgacagaagcaaaaactggaccgagagagttcttgctcctcatcccagggctcttatcctaacactgaagttattggatttctgcaatcgaaggcatttttttttccataaaaaaaaattgagctttctgatgttttcaaatctctcctagccctaatgtgttgagtgataacacactgtagaccactgaaaaggtcatcagagagtgatccaggagggggcttgtttttggctcttatctcattgtcaacagttcttcctctagcggcagctcccatcacatgcagcgctgagacaaggcccttgttctgacaaagggcacttagacccaggccatttaagcctcagccgaaacaactgatctactttagaatttgatatgaaacaattctggtatctaagaagttgcctgggaaccagtgttgtgcctggttccaagtctgtgaatgagctgttgtcagatggcagagatgagcctctcttctcagtatggctggtgaaagaggaggtggagctctcttctttaggggacagccaagtacattagtacctctgttttttggtctgggaagtaggagatttatgttcttttcctgtcccagtcaccagcttgcttgccttgggctagttgctttcagagtctctgggcctcaaagcaattcacagaccttacagtgtttattttgctacccaggttttagatctttattgtagctactcttatttttttctattttataaataggaaaattgaagttgaaataaaaaaaaaagcttgggcaacatagcaaaaccccatctctacaaaaaaacattggtcagttgtggtcacatacgcctgtagtcccagttactcaggaggccgaggtgggaggatcacttgagcctgggaagttgaggctccagtgagccgtggtcacaccactgcagtacagccatggtgacagaatgagactctgtctcaaaaaaaaaaaaaaaaaaaaaaaaaaagttgcccaagatcacacaactaggatattgatagattcaggcctggggctcaggttggtgtgattccagggcctgacagctgttagcctctacctctaacttttaatttgagggatccttctaatgggaatagcacaggattctaggctctgctgtttgtcaaataaattttaatgaaataaaccgagagaataataatgaaaatggtgggtaattagcctaacaaaagataatttgctgtcagtattctattagtgtgtatttcttattgttcatttattcttcctgtgtttaaaaaattttaaggttgaatattgaaatacgtctaacacttgtagctatcagaaacatactctgaaattttgttattctttaaataggtgagttacacatttttaatactcatataattaacatatatggcccacctcctttttgccaggttctgtgccatgtattattattcttattttacagacaaggaaacttaagctcagaaagttaattatcttgtctgactgccacataggtagccatgctaggatttgcctatgttcttttattctacaaagtatatttataaaattctatttttggatattatgagtttatctgttaggaaatttttaagttcatttctcactccagagtgagaaaaaaggcattctagacagaaagataattttcaggtgtcagaaatcactttctaactggaattttttatattttagataacaatagctttatgttaatcaatgaattagttacaggtctttatcctcaatgggttcaattaaacaatttagtaatgtaagcaggaattaagtgtcttctgtcactcttttacttccttcccacagatagtgtttagaacgttttaggtccctctcttcatggagcatttccctgttgacctcccctccctccacctccttctcattttctttcttcattttgctgtaaccttctccccagtaaaacttccatcttttttaattgcatgaagagacaattggtgcatattgcaaaacaggatatattttgtagactgatgtaataatatggtatcttatttctttttgtgatcatgggaagatttagaagaagatttgggttaataaaatgatagtttctgtcctataaaccttgttttcatggaaattgatactatgttgtgttctgatacttaaaaataactttctgtagataacatttaatgcatttgccattattcttattcattctagtcataaagagatctgtggtgttgacactgactttttattgtcccagaatggtaagttgtcaggtggtttcaaacaagaaggatactaaaacttaaaaacacttgcataggaaagagaaatataactttgcctaatggaaattgttagtcatagataataatcatgatattagtcaagaaagtataatctgcttaacattacattgggtctaacctgaaaaaaagagaagaaagtagactatttcttatcaaagttaaatttatagcacacctctactataaagcctagtgagtgctgcactgacaaagacagattctggatggtctctttctggtcagcatgcagagctggcaatctggggagagagtttctattctcagtttaattcaaggatagtttctgacacctgttaacttcctccacctatgccaaaccaggttttcagtctgattaggggacaatttagaatcttaaaacatgttttgaacccatagggagactgtagtttcttgttgagaactgtaagataggaagaactaatatgaagaagttacattaaggctgttacttaagcagagatgttataaactgtccttatttttctgggtctttctctgatttctccaacaccccttcagacaaacatatacaactttgcctgggtaattagaaaataaaaagcaacactttacttatggcgtaatttcccaggattattgggtattgacaacaagttttaatcaagctaaactttgcttaaattccttcttatcattatgttccaagtgaaccttcaaaatagcactccgttcctctgcattatttccttccttctttcttttcttttcttttttcttttttagaaagaaactaagcctcactctgtcacccaggcaggggtgcagtggcactatcactgctcactgcagtgatcccaccatgttgcccaggctggtcttgaacccttgggctcaagtgatcctcctgcttttgcctcccagaacgctgggattataggcatgagctactgtgcctggcctattttctttaaatatttgagtatttttatatcaccccctgttaaagctttagccaaggtcatttacaaaaaactgatttaatatctgtttaatcttcagtattctccccttttaaatcattttgggactggtttgagactttccctcagtttggtcacacctttccttctttaagggcattgcttctctctgcttcattggggaagcaaatcatttgtactgtttgcttcacaaactatttcacattagaatcaaaatatactgttacactaaaaatttgtaatcagttaccaatataggtaaaatatatcttaatgtatcagtatttaatgcctgagcatcaaacttttcacattcccatctgtgttttacatttaagtgaattttatttttaagccattaggtttttttgcccctccctactaaagcagaattcagaagggacactgtgtttgcgtgtgtgtgtgtgtgtgtgtgtgcatgtatgcaaattatacatgtaagtactttaatttgttcattgcagtttctcatgcagtttccatgtagtttaaaatgaatttcctgccaggcacagtggctcacgcctgtaatcccagcactgtgggaggctgaggcaggcggatcacctgaggtcaggagttcgagaccagcctgaccaatatgatgaaaccccgtctgtactaaaaatacaaaaattagccaggctgtggtggcacgcgcctgtaatcccagctactcgggaggctaagacaggagaatcacttgaaccgaggaggcggaggttgcggtgagctgagatcgtgccattgtactccagcctggggaacaagagctaaaccctgtctcaaaaaaaaaccaacaaaaaaataatgaatttcctttgaatgaaacaatagccagggaattcatgtgtttggctacattcacatagaaatttgactgtgcttatgtagccttgcagacctttgcataaagtcttccagattctaaagatggcatgtgttctctgacaaaccctactatgtccatggattatttataatgctcatttgaagattcgagatagttttatattgatccagtggtgttacctaccaaacagatccccacaccacttttttttcttttgagacggaatctcagtctgtcacccaggctggagtgcaatggcgtggtctcggctcactgcaacctccacctcccgagttcaagagattctcccacctcagcctcccgagtagctgggactacaggcgcatgccaccacacccggctaatttttgtatttttagtagagacggggtttcactgtattggccaggctggtctcaaactcctgaccttgtgatccgcctgcctcggcctcccaaagtgctgggattacaggcgtgagccactgcacccggcctctccacaccacttttaaaccacaccaggatctcccccaagcagtgaaaatacattttctgacatgtgaaataaatgcaccatttgcttgcaaatactaatatttgagtggctgttcattctgtgcgtatcatactccacttcgtgttccagttggtttttaaggaattggagagatcctctaaaaacaacctatctccaggacatgcagttttattttgaaaaattgaaagggaaataacctctgttttcatgagcggtcatgtgctgaggcatatatctcatgtccagcatatgtgcttgtgagcatctgcatgtatatgcatgcatagagtatagcatactaagacagtggagtctagatttggacttgatactgcagctttctagctgtgaccacgaggaagtcagttaacttccatgtgtttcaatgccctcatctgtaatttggagacaatgatagtacttacatcaaaacgttctggggattgtgtatttgcatgtgaaatatttagaacagttagccgataatgagtgtttaatcattgtgcattacttttagaataaaattattttatgatgctttattgacaagaataataactcatatgcaaatctttcctcaaagagttaaattttatagctagcggcaaactactgtgacatttcattttgtaagtatagttctgtacatcattttctttagcgtggagcaggcagaagcctgaaagagttaaaagtatttccttgtttttcaggctttaatttaggctcattgttatacaaaaactgttagcctgggtaaagctgcaccttgagcactgatgtaaactgagtttttcaaagtacattaaaatttgccatagtcttcccttgacgattgagagatttgcatctggtagcgattcactcagccgaatgcaagatcgcactccttagagtgctgataagcggacacatgacatttgcaaagagcagtttgcccactcgagtgccagggcaaactggagaaaattctgtgcttccaatttcatcagaaacgtagggaatattgcaaatgacactaccaaatcaactgtaaatagatgataatttgattgacatctggaaagctgtcaccggctgagtagcccataacaggaacatttactgagtgcaaaggcagctttcaagtaaatcactttttgtccagtggggcccagccagattataattgcatgtccttcccttcattgcaaattccccattaccgttaccagcagtgtctcatttaaaggaaggttgtcttccaaatattcacaatgtctcatgttaactcgtcacttccctccttgaaggcttgctatgtgctggataatccagcccttgcctcccttcgttgtaataaaactcattaactttgctctttttggggcagaggtacgtattataaattagctgttaggtgaaatatagcatgactaaagttgagggctaaaacatttccagcaggatttcagcactgtcctcagaattgtctccactgtcacttttgaataaatgttttggcactgatgatttttgaaatggcagcatttcacaattgagccaaggagtggtgccttcctgctttgttggaaacacacaggatacatctagagctggtgttcattctgggtccttctgcaagtccaaatgtttaggaatataggaaaactacaatcactaaaacagatggccatttagaggttcacttgtagatagattatgaagtgagagacacttggggagaatattaagtcaatgtctgtgtgatggtctactctattttaccaaccaaatatttgctacctggttttaaaaatgcaatagcttatgaataagtttgccaagtagtacaaagttgcgtgtctttattccccaaagttagtgaccctccatttggtcaagaaaatgaagggaaaacatcatacttgctttgcctatttccaaatccagagaacattctctggtcccagcagaatctctaggtctgaaaatgcttcacatgtggagcacatagaacccaccatgatctcagtcttggaatttcaaatagtgtgttcttacaaaaacccttcggtccttgtctatgggcttgaaaagtgtcttgctagagatggacaaagaatgggagagatgagtaatgtgaagcaagttgtctctactctaggagttgtctctcttgtataaacataagacctgaagcttctgttgctgaagcaagaccaatgcacatttgccttgcaggaagggctttagatctctgtgtcacaaacaatcaagaaatcatttcttgctgtacaaatgtagcagcttattgtagcaccagtgaatgggcacgggagtgaaggatattgctaattgtactgagcctggctgcattgcaagtgtcagatgatttgataggactgacatgcagctaaatggaataggaaaagacactgcagtggactgttggtccattagtttgctcgggcatcttgttttactaaggagccctctaatggtttctcggcaataattactatctctcttcttcatgctattcaacatgacaggcacttgctgaagtcgcagctaatatatttgcactcttaactggccccaatgccgcgtatccttgagcatgtttggctaagaaatgaatgatagctatgtttttttctttgagaaaatgtttctaatgtggaagacagtcgttttattttggatacgaagcaggcgtgtggcataacatgagtgcttgtgaaaaaaattgatgcattagctgtggactgccccattgcatgtctcctgtatactagttgatgatactgaaacgggaaaaacttttatgggctgttttacttatataatgataacttcagacttgagccagaaccacagagaaggagaagtttacatagaaatgaaccttcacacagctgttttgaagctatacagtaagggattatccctttgtttcaattaattaacttacagttgagaggcagttttattttttctgtgtgtgtgtgtttttttttttttaatttaagggggtgtcttagaataaaatatttcagcttcttttggcatggctttctcactcctttgtaaagtatggtcagttttgcttatagctgtattgctttttaaaagtaacttgaaacttctaggttaagtacttgaggtttagttgaatgagcttgtttgctaaagtacagcatttaaaggtgaggaatggggctggccacggtggctcacgcctgtaatcccagcactttgggaggctgaggtgggtagatcacgaggtcacgagttcaagaccagcctggccaagatggtgaaaccccatctctactaagaaaaaaaaaaatagaaaaattaaccgggcacgtcccagctactcggcaggctgaaacaggagaatcacttgaacccagggggcagaggttgcagtgagcaatatcacgccactgtactccagcctgggtgacagagtgagactctgtctcaaaataaataaaaataaaggtgatgaatgtattatcaatagtactatcattattatttttgctaaagtctttgggagatttgaaggtcacaaaaagacttacatgtgaaaaaggaggaagaaatcagaaatacggagaattgtgtaggggatatactttggattttgaagtcttgtttagaagtgtatatacttgtggggcaataattacaatcattttgggttcttttttcatctagtcaggttgaagatgtctattttgtgtaatctttcttttgggaggaatgaaaaaacattagcaacaacttaatttttggttattatttttcccttttgcttctaaaacacgtagttgcctgatagaatagcttcccttttttttctacatcagaaaggagagaaagacaactatcttagaaacatatttaaagcacatgatgaaaaagaagaggtttttaaaaactgttgaaaatacattttctttgtaccaggtaccagatgttgatgttggcagtgcctcagagggtcacagggcatttaaaatcactaggctgtagggagtaaaattccagatctcttgcactgaaaattatttaaaaattatctttacttagcgataagtagtacaagagtactttttctatgaattcctcttaaataggtaccttagaaatacatgatcaatgaaattgccagaaaaaaaaaagagttccagtgcctcttcgcattacaaaagtagtgcttttactggttaagtaactggttgcatttaagtctctattttttttgatatgaaaagaatatcccctcaactttattagacaggatttgccttacttttgagctatccatttcaaattagagaggacagacgctgtgctccttggttatatactatgcaaaaagacatgtatatggtacttagatagtatttcgtttcttctagaagtgtaattttgagaaggaaataagactgtttttccatccacctgccatcccatgccacccctttctacatagtttcttttcttttttttttttgagatggagtcttgctttgtcacccaggctggcgtgcagtggtgcaatctcggctcactgcaatgtctgcctcccaagctcaagtgattctcctgccttagcctcccgagtagctgggactacaggcgcctgctaccatgcctggctaatttttgtatttttagtagagatggggtttccccatgttgtccaggctggtctcgaactcctgatctcaggtgatctgcccacctgtgcctgtcaaagtgctgggattacaggcatgagccaccgcgcccggcctctacatagtttcttctctgtgtgagccaaagttccttttgtcactgataagataattagggttaatagtttcagtgcaaaaataggattttggaaggtaaaaaagttctgaaaaaacaaaatctgacaaggttaccgcttatattcactatagattattgtttcttctggttttgtgggtgttccagtagaaggacttgggtgattaccttactgggcttttccagaggattttcatgcattttttatgtagttagcatcaagattttactggggaaatttgagttagttctgtaaatacaatgggattaatttttttttgggctattttgcccttcttgttattgcctgaagaaagtaaatgctttctgatgccaaggtgggcagattacttgaggtcaggagttcgagaccagcctggccaacatagtgaaaccctgtctctactaaaaatacaaaaattagccaggtgttgtggcaggtgctggtaatcccagctacttgggaggctgaggcaggagaatggcttgaatctgggaggtggaggttgcagtgagctgaggtcctgccactgcactccagtttgggtgagagagtgagactccatatcaaaaataaataaataaataaaatagaaagtaaatactttctgcagaaaaggaaacaatgtttttcaggaaaaaaaatgactggaaggaaataggtcaatattatcagttgttgcctctggagttatgactaatttctgcttctttatactttgttacattttttatattttctacagctagagtgtattacttgtagaatcggaaaaaaaaaggaaaataatgtgcattataactgattttgacatgcctaaggagacaagcactggccattcaaattgcagatcccagaaccttggttctgagccataaaaactacaggcttgttgatgtttgtatgactctcagagccccctgacatttggatagatagaaagtggtgtatttagctgtgggccaccttcccatggggtttgctggtgaccaaagtcagcaattgtgtttacagcttaagtggcagaaagggctcaccattgttgccattacttgtgcgtgattgtttaccttctgctctctgtgggcatatgtttattatatttatattgcccattcagtgtagttgtgcaatggaaatggacttacagggtggtggggagcataggggaataatttcagtatttcctctataatttctacgtagtttagtggagaatgaaaaatttacctgcctgctgtctgaatggcacttggtaaagtccttaatgtagttttgaatgttaattctggttggaggaactcctttaaatcataagatactaccatacttgaaaaaattacttagaagtctagtgtttggagtcaagagactgctttgtcactttgatcttagggttagtacttttaacctctgaactttgtcatacttgtctgcaaaatggggatacaaataatattttcctttagggtagttgtggggatatgtgaaaatcttttgtaaatccatatatatttaatttattgactaagctaatcttgccaaattacctaaattagaatggtggtgatttggataaagtccctgagttcacagcctagagccaaattgcatttgtccattctacttggaaggtgggacatcaaagatatatggttttaatcttatttttgtgagaggctgtgcctattcgaatctgcatagcttccattaaaaaacttgaaaatagttcattttctcttcctaattacttggcagaaatttagaatagaaagacagaagctagtaacaaccaacttttccttcacacttccagatcaacaaaagggattcttgggtcctagagaccaaagaaagaatcagcaggaatgcccagggtgaactgatggattgcagagcctagctggtaattactttcactgagctaaaacattaacttaatacatgggatcagagccagatgaaaatcagaatttggatctcttcctttcctgtggatatcccatactttccttctgaaggcagtcttctcttggtgggataggcctgcttcctttcctaggacatggcataaattttcatgccacactggtagactggagttgtatcatttgttgccctgggcaacttttggtggggatatgtgactacttaggtctgctggtttctagggtggcaagaaaccccagtttcttttaagacttttcagctggataccagatattgacagactcaatctcatcttggtgttcaaattttaagttgccaaactttagcttttggacttgtgtgacactcttactagatgcatacctagcctccagctaggtgatattgtgtcatccttaagaggccaacgaggtttcattttaaaagctagctcatgttgattgttagtaacttcctagtgtgttgtgctgtgaaagatggtgaagtcataatgagattcactggcatgattgtttagtgatgtgtgtttgccatggattgggaggggcatatatgtattttcagagggatgtcaaatctatagtacagaggagctcatttaatctacagtgcccccaacctcatcctttccattgtatagtggagaagttgggtatctagaaagatgaagctatttccagcttattagagccaagtgtggacttgaactcaagttttctgagttcaacttgcttgttactttttggggataatagtagtagctaccttatgggatttagagaaggttaagtaaaaaaaaatctatattaagctttaggaatagtgacagacactgagaaagatatagtaaatgaaagctgccattattgtcatcatcatcatttttacttttatcattcctgttgcactttattactaccaacaccatattttgtgaggtagtcaggtagctaccttaacaaaagctacctcttgttttgtgccatatcgtagaagccccacttttgctaacagactgaagcaagtgttcaacttgcgacaatttaaggaaaatttgacagtatttgaccttgtacagagacccacaaaaggcattagttgaagataaataaatggtagttagcaatcctaatttgaatttttgtacacttgtgtgtgtgtttatagataatgtttcccatttataaagatttgtcaaatacgattctactcaagtacattctcttgaaacagcaggaattctatggaataaggatttctttctttctttcttttctcttcttttctttctttttttttctctttcctttcctttccctttcccttccctttccctttcccttcccttcccttcctttccttttctttcttttttttttgagacggagtctcactctgtcacccaggctggagtgcattgacgtgatctcggcttactgcaagctccgcctcctgggttcacaccattctcctgcctttcatgatttcttattaagcagtctcctatacttccttgcttcctgagacttcttcattaaatatgtactatttcaaatgttttaaatttcctagtcctgtcagcacagggctttaagttagaagacatcagttatgaaatctatcagggtgtagttatttaaaggactagacttttgtgaaatttttaattatatgggattatacttatgctatattaattgaaaagaaatggatgtaaaactatataaagtacttacgaaagaagccaagttaattgtgccttggttagatagtgaatggttaatgccattttgtgtcatactggctttgtctctgttttatgtacctgctgtctcactaacagtgttgcttagtagaaggagtgtgggctttgaagtgagatgggtttggggcttcactccattgtcttcatttaagagctttgagactgcgtaaattgtctctctgagccttagttctggttagacttggatgctctctcctttgcaaggtttctttatcctgaaagtggcttgctcttggaggtgcttagtaaatgttagctctttttctcttcctaaccatgacctttacctcccatcctctttccctggcattctgcaaggattagttcagggattaaagcaacttggaaacgttttagtttcatactgtcatttttagtggtttgccttttaaatcatctctttactgtaaaagtcttggttcctataaatctcacacccttgggaaccaaactcatgacaatcatgaagtgtcttacttcaaaggataagaaaaccaagcaaaccaaaatcatgatatcctctctggagcagtgtgtgtgagcctgggatcagcctgggaatgttggttaatggtgtcaccatcctcctctcgctggcagtgatgtggagggtgtggagaggacatgggctgagctagggtttataattgcatggccgtctggccttccttgagcattctttcccttccaggattcctgtaattgtcatcagatggctcagtctcccaatgtttccggtattgcaatgacttctggagtgtgtttaaaaaaaaaaaaaaaagccagaattagcagttagcagtcatcatttgtttgtgtcagttctgttgtgtgtagaggcgtgcagattgggcgtctctggactgtagaaagaccggtcacatgtggagttcgccttactatcttgtgttgaaccttcctacttcctttgcttattcttttccgcctacactgctttaaaggactccctgaaaaaaaaagtgagaaaagatgcaggcagtgttcctgttttcaactctagtcagccttctttttattctcattgttctggaaacttgagaggattgcatctttcttggatctgctaaaggcctagggaggttgagagttggactggatagtgagtgaaccctgtgaagaatgattccaagtcttgggctgttcgtgggcatggaggaggagagagtatttgtattttcctttatcatgaacttatcactaaaggcccaaatataggaatatatcttgcatgggttttttttttcccccatcagataagctgttgtaatttgagcctgacacttcttcttgaggaaggggaaaattgtgtaaatgaaaaaggacagctaattttttgaaaaacaaatctggagtgattgagaggtctaaacccccaaaagtgtaaaattgaagagaactaatatggttaattttgcttcatggtgttagctgaggaattgtgttttttaaaagccctttgatttactggctcttactcacctaatgggtaaagtattatagttcattgcattctggtgcctttgtttgtctaatggtggagtgtttttcttaagttacagggacccaggcctagatgatgataatgactatagtgcatctttacaaaaaacagcccttttacagttgtcatacggatcttttagaataattgaggtgaattttaatgccaaccctgttaatgatgtctatcccacctctctcttcccaggtggctgggggtggcggttggaaacaggagagccttggtcttaatgaacagacaggagatatctcaagattaatgtgaaaaaagctcagtcatgataattgcattcccctcggcagtgattggtttacgagcagtcatgtgattaagttctgaccaatactttgtaagaggaagtctgctgggggacggtagtgagagtttcccatctggaataaaaaacacatcactgcttgaaatgtggctgagatgcttacagaggagatggaccttcttggccagcctgaggacaataccttgcagtgagaaaggcagagccatgtcactgatacccagcactgggtgctacctctcacttgttttataacctataactaagtcacacaatccaatgtatatcatttaaataattttctgtttcaagatgtgaaaggcaaggcccggcgcggtggctcacgcctgtaatcccagcactttgggaggccgagatgggaggatcacgaggtcaggagatcgagaccatcctggctaacacggtgaaactccgtctctactaaaaaaaaaaaaaaacaaaaaaacaaaaaccacaaaaaacaaaaactagctgggcatggtggcgggcacctgcagtcccagtcccagctactcgggaggctgaggcaggagaatggcgtgaacccgggaggcggagcttgcaatgagcccagatcacgccactgcactcaagcctgggggacagagtgagactccctctcaaaaaaaaaaaaaaaaaaaaaaaaaaaaaaaaaaagatgtggaaggcaagtacccctttgggtgggatcgaaatctagaattggccaggcatagtggcacccacctgtaatcccagccacttgggaggctgcagcaggagaatcccttgaggccagcctgggtaatgatgtagtgagaccctgtcaaaaaaaataaaaaggacaaaagaaaactagaattgatccttcccaaagaaaatgttcactggcttgttaagtcatatcctaaccatgtcattttcaccactggcagaaccttgatgaaaggtgtgatggggtaaatacattcgtgtttggtttgtatggtttatattaatttaatttgtttctgctgtttatagttggattttctttgcttaggtaactgatttcggctttggattgttatgattgataataagagaaaaaagaatgtaaagtgttgagaaatagtctaaaaaaacattgtattgttggagcagttattcagttttcacagtattcctttgggcaattggatttgttttggtgtctgactttgttgacaatcctgttgttatattaaagctgtttcttgcagtatgttttcccttttagttaagaaaactcactttatttcctaagatgaattataattaggactatttggtattgagaatcttttctcacttaatacccctaatgagatacaaatgttctaaatgtatccttatgagtagattatatttagagaggaatccacttattttagttaactaatccctttgcttttgtatcatacatccttattaggctcccacgttcctattccatatggaattccttgtgaaatcagacctcagcaaacaatgttattaactttcagggtcagtgttactgaaaatgtcaatgaagtttgttggttttacataccttgtttttatagcactctagcttttttatacgcttatgataaatacgaattctttccctcttcttgcaaagtaaactttatttcttagttggttccccccgctggtatttatgcttctactcactagaattgaaggaattgaatgtatttgaactattcttttggccccttctgcagactgggaatggtctttctagcttctcagatctctgcatattgtgcatccttgttcttttgccagaaacctgaaaatttcccagcagaactaactggcaatgatctttgaattatatgaatcaggtttgcctggcttctaggagtcaatattatacccttctcaatgactgtatccttctttctgaggaaagcagataagttagtgatgaagttttgaagaacttcacttacggagttacacttcctgagttcaaatcctgacttcactgcttacaggttgcatgcttttggacaagttatttgacttctttatgctttggtattctgaatgggggttataatgcaactgatcacgtaggttgtcatgaggattgtaagtgaaaatttgtaaaatgttcttaaaatagttcctggtgcatactgagtgtatagttggtatgatggtatctagttgattttttttttttttttggagggtcaaggtcttgttctatcacccaggctggagtacagtggcatgatcttggctccttgcaacttccgtctcctgggctaaagggatccctccaccttcacctcccaagtagttgggaccacaggcacgagcaaccacacctggctaatttttgtattttgatagagatggagttttgccatgctgcccaggctggtctctaacttctgggcttaagtgatccacctgccttggcttcccaaagtgatggggttacaggtgtgagccgccgtgcctggcctctagttgaatttttaaaagtactttttaatctattttctcttttggtcctcacgccaccctgtgaagaggtagtagtattacttattttatagggcaagtcatagaaacacagtgtcagtatgtgactttgttactagtaacagtgttcgaattataatctagatttctcctctcatctgttatagttgactgtgaatggggtctttaggaagttgctgtgattctgtgatgttatcagtcagaaggtgtaatgggaagggcatcaatctctgtttcttaaatttggcccagtggtgagccagttcattctaaaataatttgtatttgctaaatgcagatatttctcactttgcatgattttaatatacacaattttcagttgccatggttaactaaataatactagtccctcaacacagtccaagtttcagttatcatgttacattaactataattgtggccgggcgcggtggctcatgcctgtaatcctagcactttgggaggccgaggcaggcggatcacgatgtcaggagatcgagaccatcctggctaacatggtgaaaccccgtctctactaaaaatacaaaaaattagccaggcatggtggcgggtgcctgtagtcccagctactcgggaggctgaggcaggagaatggtgtgaacccgggaggcggagcttacagtgagccgagatcatgccactgcactctagcctgggcgacagtgtgagactccatctcaaaagaaaaaaaaaaatctataattgtataaaatcccatacactagcacttcctgttattttgttcatcagcggacagcaaagcatgtagtcgtgttgccttcttgtctcccagtgatagacccatgtagcatttcataaaaatggataattaaaggggagaattgtcaaagatcaaagtgcatcaaataaatgaagtgttaaaattggattaaaattttagctaattgtaaacagcattcttaaaaaaaaaaaaaaaaaaagcttaccaagggaatgtcaactcagccagtgttctagaggctctatatatttagctaggagcacttagtgaaagataactaacttatcaaagtcagttatgaagtggttgtgatgaaaaggatgaagatgtaacagaggaaagatgctggcaaaaaaaatcatatgagaggaactctcacagatattgtataactgtgaaaacacaaaggataaaatgttggaagcaagtctgaacttagaaggaagtatacctatctaccaaggcatggaaaagatgcttgtttagaattgtaaattagcaacgagaataaggcattcccattgaaactactattgacacagttttttataaataaataaaacaattctcagagtttctgatgttttagagtactaaataaatatacttttcattttcctacacatttatagctgatagacagtttttactgttttgacaaaaaaattaaaggtcatagaacaatcataatatttctgttgattattaaaatcatttcatggccaggcactgtggctcacgcctataatcccagcactttgggaggccgaggcgggcggatcacgaggtcagtagatccagaccatcctggctaacatggtgaaaccctgtctctactaaaaataaaaaaaaattagccaggcatggtggcgggcacctgtagtcccagctacttgggaggctgaggtagaattgcataaacctgggaggcggagcttgcagtgagccgagatcgcgccactgcactccagcctaggcgacagagcgagactccatctcaaaaaaaaatcatttcacatgatttcagcgcgcatgatcacttttgtggtattgcattatcatgcaaaatgaggactacctgtatttattgagccaagtaggcactcttgtaagtgatgagggtataccaacaaagtggacaggccaaacctgcctttaagaaacatttattccaataaaggcttattgagtgtctgcagtgtgccaggcagcatgtacacatgtgaatgaatagtagttcgtttctcagagaatttggatcttagttgactggtgagagacaagaccattatactataacatatgcctataacatgtataatacatttctgtgaatgaaataataatgaaacaccaggcattgtaagagccaagaggacacctatcaaacacatagcctgagtgtatgagaggtgggagaagcagggagacatgcctggaggacttaggaattaatctggaaaagctgcgttgaagaagggtacagtggtgagatgcttctgcatggaaagcacaggacattttaaaaagttgagtgttgttgaagtgtgtagggtaagatatgggccagatcaggaacgccatggaacttgtaggcaatggggagggtctatagggttttcccctagtttcttttaaattaaggtataatttatacacagtaaaatggacccattttattgtattgtttggtgtgtttgatataagtgccatggccaccgtgacaatcaagacgaagaacatttatattactccctaaaatcccccagtgctcctgagtgactaactcctcccacccccagtccctagcaaccactgatgttttctgcccctatagttttgtgtttctcaaaatatcatgtaaatggactcatgcagtatgtagtgctttaattctgtctctttcctttagcataatacttctgagattgatccatgttgttgcatgtaagaacctttgggttttaagcagaattatctgtgagatttggttggaggatggatttgagaggagcaagactagagactttgattgtattacaatttaaccaggtgctaatggagtagagggaatagagatgccaaggaggagcttggtttgaggtaggaggtggaattcgtttcaactaaggtggggaatctagaaggaaaaacaggtgggaaagaggaggccctgcatattggacatgttgaggctgaggagtgtgggattgtcctgcaagtcaaccttggcagggtgtgaggcatatgaaggagttgatttctctccttccttatcctctgatctttgccaggatcaaatttgctaggcactgatcttgttaattaaagggctcccttttctctttatcctaccatatcaccaccaagaatttgctcccaaggccttgccttggactgtagactgtcattgaatcaacttgtcatgtttaaaaggaatgacctcttttttttttttttttttgagaaggagtgttgctctgtcgcccagggtggagtgcagtggcgtcatctcggctcactgcaagctccgcctcctgggttcacgccattctcctgccttagcctcccgagtagctggaattacaggagcctaccaccacgcccggctaattttttgtatttttggtagagacggggtttcaccatgttagccaggatggtctcgatctcctgacttcatgatctgcccaccttggcctcccagagtgctgggattacaggcgtgagccaccgcgcctggcccaggaatgacctctttatggagtgtcatcagccaagtcagttcatctgtggttacccattgtttttcactggtaacgtaaaaatatctgcggagatagctatggtttgcttggtccgtggaactggaagtcagagagttcagttgtcacaaatccaggctggagattctcttctgtaaagatcctggacatcctttccaccagaaggagttttctggaactgtatgtttgagggtactacatttgaaccagtttgaaccaaatgtgatggaattagtgatgaagggacacaatattacccatatttaggatgtggctgactcatcttgtgtgctatgattcagtgattctaattcagtaacggttctgaagctgcatcctggctaaggaaataattctgtgcttgattaatattgtctaagggcagggcgcgttggctcatgcttctaatcctagcactttgggacgctgaaccaggaggatcacctgaagcaagaagttcaagaccagcccgggcaacaaagtgagaccctcgtctctacaaagaagaaagaaaatattatctaccttttgcctaggaggggaagcactgtaggaagcggtggccagagtagttaccctctttaggtgattcaccacaaaaatacactcaaaaggtaccggatatagaataagcccactaccgtaacttcagctaacagatcatttcatcatcaggatagctccatgatgtaaagcatgtcattcttgtctcttacaagtgaggaaattgaggcacaaagaggtcaagtaacttgcccagtgacagacagctaattctggcagagctgggatttaaactcaggcagcgtggctccagagtccatactctttcatgcacatcatgctgttttcagaattctagaatgctagcaccaggccgacttaggaaaattattttgtttccccgttcttcattttacagctaataggagtaaagtctagagagggctctgagatgactgactcaagatcacaggtgatggtggatggagggagaactagtttccccctgcccagggcttctgacactcttggaagttttgtacctttgtcttggttgcttgtcagtttcacatcagtgaagagagatgttgctgaagtaggcagactggcaaaattggtgtttaattccattctttactttggcctcagctctctcttgcctgggaatgtactaattggctctcttcctgtcccctctgccatttattattttcaagggagcctggaatcactgttactcgtctctagcctgtcctgtttaatcactgattgtcagatcttttgctctttccagtcccttcccactaagaagtaggagaggggagaacctgcccaaccacgtgggtttggggtgagttttgggatgggggaagggaattagactgttgcagggtgggagttattgtgccgcagatcaatgaccttcccttgaggatgccactctttgtggttttgctctttctgccccacctgtatcacagtcatcctgtgggttcccagcaggactctgccccccacatttggggcagggcctctccccctttctgcagttggggttcagagctagagagggagttctgacgaaatttgcttgccccatgcatgcattctcatggaaccctgattatatggtatccgggacagaaaagggtttacatttcatatctgttgtaactttattttgaagagccacagtttgggggataaagtaattttctttaatatttgttgatctttctcttaaagtctcgtgtgtaagcttattcaggtagagactgactttttttttccctccgtttcttctgtactgggtctttgtatgtaaaattctaagtcctgttctagtcttcttccacctacccaggaatgaagttgaatattaatgcaccatggtcaccattctccaatggctcagtctttctccacattttctataattaagactgtccttcccaatttcaactcaaaatacctgaaaagactccttgtttagttaagagaaagcaaatttccccaggtaagttcccatatgttttctgtaaaaactagcgcacactttctttgtattttacctctgtcaaatgagattcttagaagagtaatcagccattctaagccactccactcttttgacttatattttcatgggtaattttaactctttgggtgctgtccagaaagtttactgctgcttctcacaagggaaggtgtctgtggttcccgagactaccctcttcctgccttcctttcagcttcctcagaggaccagcaagctccagttcttctaaataggtgcacaggcccagaggtggattttccttcaaggccctgggaaaaggccccagcaatgtgttcacattgccatttgtttctgtcaagtttttgtgtatttttatttttgcatacttttttttttttttggagacagcatctggctctgttgcccaggctggagtgcaatggtgcaagcttggttcactgatttactcaagaatggatgcgcccagcctgcatccattctttcgtaaataaatacataggctgggcgtggtggctcatcccagcactttgggaggccgaggcgggccgatcacctgaggtcaggagtttgagaccagcctggccaacatggtgaaacctcacctctactaaaaaaaaaaaaaaaaaaagccgggtgtagtggtacaggactgtagtcccagcaactcaggaggctgaggcaggagaattgcttgaacctgggaggtggaggttgcagttaggcaataacgagccactgcactccgacctgggtggcagagcaaaactctgtcttaactaaaaaaaagaaatacatagcaagaatttccatcaccttaagtagtcacctgatccccttactttccccgtggcctcagtttttgcagtggtgatatctgtgaaatggagaacaactgttcatccacactattaaacaggaggtgaaggccctcgcacaaacctgcccagtgggatactttaaggcttgggcagtcttgtcttgcactgcaatgagagcataaatgtggacacatattaacctcgcctagtgggtagttgggttcagcacaggtgggtttaaagttcccgttcttttctacaaagtgcaaacacattccctttccaaaaggtacactggaagctgtctttataaaatgctttgtagcataagcacatacagagaatactgtattcatactgtattaatcagcctctgtaagtgtccattctctgggtctcacgggcttaaaaacttgaatgatcgtcatcttatttcttcttccactcttgtcatttaccaagtcctggaagtagattgttttagtttgcattgccttctggaacagtcctctccttaaaagaaaaagtctcattattattgctccgcagttggagggcaggggagtggtttatactgtgagttcacatcactcttttaactccttttcattcccactgacctactataggcttgttgcagtacctgcccactttaactttagactttctctaggatactctagtgattgagattggaggcttttaaaaacacctctgactttgccagtgctcagccccaaaacttcatttattgcagactctctgtattcagagtaagcccttacctctgtgctcagtatccctccttgagtgtaggcttgcttacctttctacctccatctctttctgacactcttttgatattgtgtcctatccatattgtttcccaggaatacctcttattttgcagtctttttcttaaggcacttattactttgtcccttgtgggacaattatttgtacatttgtatagcgctccaaactagatttagaaattcttgaaaatactttatttacttttagtagtggtagtatagtagtagtagtggtaaatagttaaaaaagtagcaccagactactgcaaagaccttagggcaacatcccctgaatactctgaaccctaattatctgtttgcacagctgtcttccctgctacattgtgagcaactccagggctgggactgtgctcccagaatctccagtgctacagcagtgtggcaggaaagtctttttgactaagaagatagtcatgtttgtttcttattcatgtgatgctttcctccattccttgaataggaattttttttcttgttttaagcagaaattttgcctttttcccaaattcactggaaaaatcggatgctattccactgttaattgaggtgtcactaattactttgcttgaaatttcaattattctaaaatcttccaacattttcatatatgtatcgatattttaaaaatataaaagaattttaaaacttacatttggaaaatttaccaatacagttttggctaattgggttgtcagttagccaaaggttagggatgattgatctagtttaaatatagctttgcgatttcattgaaattacttaagaaaaaatatttctagacagcatggaagaaaggtgaatataatagtggtttaaatgaagtagaggtttaatttgtgaattaatttttgagattgttatagagatactgtgatcaagtgctaagtcaataatgtaaagcagtgcatatcatttgaagctgttcccaaatatatcttaaagctaaatcaatattaaaactgtcctaaatagtaaaattgtttaatcattagacaacctgagctttatgtaaatttgtagactcttgaaacttgtcgtatgcagaagcgtaagcgtagctataacataagcataaaccattgtgatttgcataatttatctcttcagcataaatattgtacttgtagagtaacatttttgtcctggaaatcagattttggttgtctgagtatttgtgggactggaggaggttttaggtttatgtttgtgtttagattaaatttgaatggtgagttaagatttatggtgagcagtgtgcagaatgttttatttactttttcaaagcttatgaataaaagcaacatctgaatctgatctttgggaaccaagttcaggaaatgtggtataatctattttaattgtctcccttaatttcaacttacttctgtttatttgcaaattgtgtatttaagacattaacatatttaataccctgttattggatatatttaactttctactagcttcatgctttcagagttttgaactctgaaaacacaagcagcattaagacctgtcttttgcttaaagtactgagtgattacactccgatgttttcattatatgaaacacccctgctttacttcagagtaaatgcttctaagaattaggcatgcctagcttctaaggtagactattcacttactcactcattcattaatacattcactttttccaaaaatgaatattccatgttcatactatgtgctaggaatgatagtggatatagtagtgaacaaaaggtagacgtttctggccttcagagtatcttagagtctggtaggggaggagaatatgaaaccaggcaaccacagtaccacgtactatgataaatggtgtggaacccctaagcccagagttccatcggcacatatgtgagtggtgcccaaagtcttcctggaggaagtgacacctctgcctctttattcttcagagtcagccagtggaaggggtctaggaagggttgctacaaatgcttctggtacaaagaacaacattggtaaaagtccagagaaaatagagaagtcagcacattagactagtatgtaaaaactttaggcaactagaactcaaataactagaactctcattttggctcagaaaaattttcctctgcattttacttgatgaggagatgaaaaatgactacaaacttattgatttcttaccccgatagaaatactcatttattctaaaaaaatttaattatacaaaattattattattattatcattattattatttttttgagacagagtcttgctctgtcaccaggctggagtgcagtggcacaatctcggctgactgaaacctctgcctcctgggtcccagcaattcttctgcctcagcctcccgagtagctgggactacaggtgcacgccaccacgtccagataatttttgtatttttagtagagatggggtttcctcatgttggccaggctggtctcgatatcctgagctcgtgatccgcccccctcggcctcccaaagtgttgagattacaggcatgagccaccacgcccagcctatacaaaattattaaaaattgaaagtcataataatattatatagataatcttacttgtcattttgtaaatatccttaccagttttctcctttccatctttggttttataaaattgagatgatatcaaatatgctattttgtaactgatattttacagttaacataaaaagcacattgtgttcatatcattggaagtatttgtaaaatatcaattttaatggctgtataatattctatcatcaactattattcatttatacatcatttattatatattttccaatatacttgtattggaaaagtagattgtttctaacttcttgttgttttaaaaattctgccacgaatgtgtttatattgaaacatttaattaaatctttcatatttcctttcagcactttgggaggccagggcgggcagattgcctgagcttaggagttcgcgaccagcatgggcaacacaacgaaaccccgtctctactaaaatacaaaaaactagctgtgcctggcggcttgcgcctgtagtcccagctgctcgggtggctgaggcaggagaattgcttgaacctggtaggtggaggttgcagtgagccacgattgcgccactgcactccagcctgggcaacagagcgagactccatcttaaaaaaatatacataataataataataaagttatagcctttcttctgtgcccctgcttttttttgtaggtatgcattgtctgccacctgcctccaatatcagtccagccctgatcttcagacctttggtgcaaatttgaaaatgaatcttttttgtatctgttcaagtaaaagcgtatcagctgaacaaaatgttacgtggctggacacaaaactgaagggtaatgtcgttttgcattaataaaaacatgaaacaattagatcccatttttttagagtgcccactctaaaaaaaagaagtccctggataaagcgttttatctggagatagcttctctctctctttttttttcaaacaaaggaattatatcttatagagaattttctttaagtgcatgattaagtactctttttggttagtgaattggaatagatctgttattaaataaatacctctgtagagttaagaattaaaagaaaactggacttgtttcttaggtaaagtaaacattttttttcttaaagatgtcaaggatgtttcccacatagcaaggtattctatcttaatactagaagccacttggtttacaggggttttattttttgcagattttttgctcttctggggctgaagtcctgttgttttcatctgtttatcctgtgtttgccttactgtccagtacatcatagataaccaataagtgttaaaaaagcccaatactttttaaaaagctttattgaaatgtaattcccataatatacaattcacctacttaagattttttttttttaaggcggagtcttgccctgtcgccaggctggagtgtagtggtgtgatctcggctcactgcagcctccgcctcctgggttcaggcgattcccttgcctcagtctcccgagtagctgggactacaggcgcccgccactacgcccagataatttttgtatttttagtagagacggggtttccccatgttggccaggatggtcttgagctcctgacctcatgatctgccagcctcggcctcccacagtgctgggattacaggcgtgagccaccgagcccagccaagatgtttttattagtttcagtagtttttttttgtttttttttttttttttttttgaaacgaagtcttgctctgtcacccaggctggagtgcagtggcgcgatctcggctcactgcaagctccgcctcccaggttcgcgccattctcctacctcagcctccctagtagctgggactacaggcacccgccaccgcgcccggctaattttttgtatttttagtagagatggggtttcaccatgttagccaggatggtctcgatctgctgaccttgtgatccgcccgcctcggcctcccaaagtgctgggatcacaggcgtgagccaccacgcccggccagtttcagtagtttttagtatattgtctaactatcactacattcaattttaaaccgtttttattacctcagaaaagaaacccgtaccctttagctttcaccttcctggcccccccacaacactgccattcctccagccataggcagccaccataatctactttttctctatggattgcctcttctggacatttcatacaaatggaattatactatatgtggtactttgtaactggcttctttttatattttcaaggttcatccatgttgtgccatatatcaatattttattattttctttgcctcttaatatttcattgtatggataggtcacagttttatttatccatcagttggtcaatcaaatacttttaaatatgtaaatcagcttgggtggttgtgccttataaaggcaaaaatgaaggtagaactgaagttgtgatatcctaaattggaaatgccttcagagcttgttagtcgttaaggtatatataagtatgtttagaattaagcttatatgttgttgggtttaagataatagcacatcaatcagtaggatcttgtcagttttacctcttggatacttcttaaatctgctttcttctacttacctctggtaactatctaatcaaaatcttttttttttttttttttgagagagggtctctctgtcacgcaggctggagtgcagtagtgtgatactggctcactgcagcctccaccttctgggctcaagctgtcctcctacctcagcctccttagtagctggaattacaggtgcacgccaccatgcttggctggtttttttttcttttcttttcttttttttttttttttttttacaatttttgtagagatggagtaacctaggttggtcttgaactcctgaccgcaagcaatcaaccatccttggcctcccaaagtactgggattacaggcaggagtctgacatctaattaacatcttttgtttgaacattgcattaccactgccatccccaaaagaaggcaaaaggagcatttctaaaaatatcgttttatgttaggggtcagaagtctttaacataacctgcttggctgccttcacatcagacccttgctgcctttccccttcctctgccctcctattctttaatacttgttttgtatttaacagaggataatggagtcctttctgaagttgtttgggcatctgagatttcagcttataccactttgagaactatgcattaaggatctcgtttgaagccttgtgcagtggaaagagctcaggcttggaagtctggtaaactaggtataggctctgcggtccaatgtgcactagaagtgtgcttgttccttttgagccttttatctgcaaaatacagatgctaccttgcaagttgttgtgaaagagaaataatgtgaaagtatctgacacataatatgtgcttaatagattgtcctttctgtttcttttttggattattgttttgaatgaagtggcttaggtcatcatgtttttttggctgaaaagaaggatttatatatattatgatcattgttggtagtttgggggttttttcttccaaagtttgtgtctttgtttcagaatcctgttttcatgaagactctggaattttgtcactgctctaatacctctgccaggcagcagcactcctttgggtctctgccaatagagaacatcatttattgccttaaaaagaaagtatttgtgtgtatgtatctttacaatatcctcattatgagagtaattgtagtatttgtgtgtatgtatctttacagtttcctcattatgagagtcattgtttttcatttataaaataggaaaatgcagaaaatagagaaaaggggaggagaaaataaaattcatttgccatttagtcacctactgtggccattctagtttatacttttctagtctttattctatacacatctacatacatatatgttagtgtggctttggaagtagaagttagataatagtatgtgttttgtttaattgctgttttctcattgccagtatagatattttcagtgtttagtaacatggaatgtatataatttttttccggtctcagagaattccattgtatgggagtaccatacttattgtcaccacttctctttgggaggacatttaggttgtatccaattttttgttattataaacagtgcttgctttgattttacagtcatgcgtgattctgacatgctttttacatcctaacagttctttttttttttttttttgagatggagtcttgccctgtcgccaaggctggaatgcagtggtgcaatctccgctcactgcaagctccgcctcccgggttcacgtcattctcttgcctcagcctcccgagtagctgggactacaggcacccgccaccatgcctggttaatttttttgtatttttagtggagacggggtttcactgtgtaagccaggatggtctcgatctcctgacctcgtgatctgcctgcctcggcctcctaaagtgctgggattacaggcgtgagccaccgtgtccagcccctaacagttcttatgaaataatttccctgaggtttgatgataaattcaattcaaatttgctcctcatgtttttcacaggtcttttgaatattacaactcatgtggcagaatgtccctgttctcctttttgctcttcatctggtactagttttctaatgtgttcatacccccacatccatttaccttggctaagactcttcttgcctttgtctgccccaaaccactgtcctatcgtttatttatttatttatttacttttattttttaatttattaattaattattttttttgagacaggagtctcactctgtcgcccaggctggagtgtagtggcgccatctcggctcactgcaacctccgcctcctaggttcaagtgattctcttgcctcaacctactgagtagctgggattacaggcgtgtgccaccatgcccagctaatttttgtttttttagtagagatggggttttgccatgttgaccaggctggtctcgaactcctgacctcaggtgatccgcccaccttggactcccaaagtgctgggattacagatgtgagccaccacgcctggctgccactgtcctatcttttaaagaatgattccttcatattcgtttctttcaattgacccttattattaacttcattaatttgtttccttcgtgttgcccatcatatcacctcaaatttggaattacttaagtgtttaattttttaaattattctgaaagagagtgcttgctttctttcacataacagaattagtggagtggtttgtattatgcattacaattaaaattacgtctttacaattaattggctgttgctctaaattgggatatttctgaagttattttaaatccaggactgtttttctttcctttgtgtctgtttcttgcctacagctagttgattatatccttaaggagtactagccattttaaataattttaatctgaatttaaataaatcaaggtggctgggcgctgtgggtcacccctgtaatcctagcacttttggaggctgaggtgggcagcttgcctgagctcagaggttcgagaccagcctgggcaacatggtgaaaccccgtctctactaaaaatacaaaaatagcagggcgtggtggtgggctcctgtaatcccagctacttgggagactgagagaggagaatcgcttgaacccaggaggcgaaggttgcagtgagcccgagatggttccattgcactccagcctgggcgacaagagcgaaactccctcttaaaaaaatatgaataagtaaatcatggtgtgtattctaaagccatagttataaacttgaggggtaggtaatacggaggagtttcctgcaggtccccgtggctgaaagtcagcgtagaagtgcctgacctggtcggggttccacttctggtctcagtcctgctgaggcagcagctgcgttggtcaggtaggttttggttttggacacagtggcccaccgccgctgtacattgcaggattatttcagttcaaaatgaactgattgctgagctcctctgcagccttcgtgttgcaaggactacagtttgtggaggcccggcaccaccagcctcattgaggacattgacaaaaaatacttggtcctgcttcaagatggaaggacacttaatagacttaagaagtattgatcaatttggacttggaaaatgagaatgacacacccctccagcaagtatccattgaagaaatcctagaagaccaaagcgtggaccagcagaccaggctggaagtagaggaactgaaagttcaggcccactgggatcaaggtctttccattccttgagcagatactcttgatgagtattaagtcctctgctcagaagctattgctcttgaagagtaagggctgtcactgaatgaaactgataccctggttacctcacacatttgaccagggactgtagtgtttctgaaaaatcatttttagttttaattctagcacacatacaacatgaagaaatcatgggagtttttttttttttaataacgaaatcagtgtttaaggaaacagtggtatggactccttcactgtggagccagcagctacttctgtatattgctcttcttatcccaaattagagtttataggggacattcttcatttacttataaataaaatataaatctcaaaagatgccatgaatctcaaaaagcgattaaacttgagcatgcatcagtatcacttgcttgtcttgtgtaatcacagattgctgggcccctacccccaggtcttttgattctgtagtggtcagggtctgataatttgcattcctggcaagttcctggatgatgctgttgctgctacttgtgagacactactttgaaaacaactgttctaaaggaacctagaaataatgtttgcattatctgtattccttgtaattacatgtattttttctctttactgttgtacatgacagatataactgagcatattttagtaaaagcaaaaacaaataaaaaacgcttcattggcaaaatacaagagggtcactggataacagatatacagtcttttgtgggataggccagcagataaggcatccagaggcttaaagcactcagggtcctgggttgttcagcccaaaacaggtttccttaaatattttgtagccttagtttttttgtagaaaaatggcgactgctaccagatctctctggaccctttaactcctaaatctgtagtcagatattcagtatgtttaaacaggcttacaatactgcaaatatcttgattaagaaatgcttgtatgtttttagtaaatgttcagagtaatttaataaaagccttatttgtaagttttatcacaatggagatttaaaagttggatgaggaaataaacattgaaatcatagatattccaaatgtctttcgaagcctgagctacagcacaagctatggtctgtatgtcaggcctgatagaatgtaaggttgagcccagaaaaaaggaggtggttacagaaatttttaaatggaatcgaaactgtcattggatgcatttggttcatcagatccagattcagttcgatgtgcagttctggttccttatcagatgtaacgaatagtagttgtacttattagtatactggcaatttaggccggacacggtggctcacgactgtaatcccagcactttgggaggctgaggtggggccgatcactcgaggtcaggcgttcgagaccagcctggccaatatggtgaaaccctgtctctactaaaaataaaaaaattagctgggtgtggtggcgggtacctgtaatctcacctacttgggaggataaggcatgagactcccttgagcctgggagacaaaggttgcagtgatctgagattgtgacgctgtactccagcctgggcaatagagtgagactgtgtctttaaaaacaaaacaaaacaaaacaaaacaaaaaaacatactgtcaatttggacctttgggcttgaagttttttctatatgacagctgagattgggggcgtgggataataccatctgcaacttgttggcaagcacattatttgtattcaaatagaaaggacgtactgttagaaaatgcgcaaagggaaaaaggcttttgtagaggtcatttggcatgtaggtgtatgaaaggtgaggctacagcaacacccagcagctgataagaccatacacagtgtaagatgaacggaaagtttcctccaagcaccttgggctctcatgttaagacttggtaaaaaggttgctgatgcttcatttactgtagcgacaagcccctttatctcagcggctgtcaatgtgagttggaatttcacatctttttaggaagtcttttggaccattttaaaattattattattgcactgtccctcaccttttttttttttttttctgattgcatgacgtgtagtcctcttttcttgtcagcaattaggagaaaaatctcaacagaacgagaaaaccttgtgacgctgaaaagatttgcctgaagtgttccatgtaagcagtgggaatggacatacactgaaagagagaggggaaaaaaggctttttgttgagagtgacaggcaggcaggatgagcaaagtttaacctaaatcctttcattgatattgcaaagtcataagccttcatatgacactgccacattcaactcactgtatgatctggagttcagtagcttgtaccatagtgcatgtgtgtgtacagtgcaaacattttatgaactgcagtgtctgatccatccgtctgtctgggcaagagtgtcccttgatagtaaaaagaacagcaatcaggacagaattggtcaatgcggcatgtctaatagtgggaagatatttgaaggactcactatagacacagtagtctctctaaatagcctctttgcacccggagtcttattgcaaacaggttcattaaggagagacattctgacacacagcatcacagtaatgaaagtagctctgtttttctaatattgtatcttgccacttcagttaggctgctagtacaagatttcccttgtgttgttgtatgtttctccagaaaaagaatcagtcttcatagaatatacaattattttgtacgggaatgtataactcctacctaagatccagtcttccctgtttatgtgcactagtgcaaaaataattggcaaacacatcctccagaccaaaagattccagcaccttcaatttgttgggcttgaagacgttgaaccagttataataaactttaaaaaaatgtgtaatgttcaaaatggatttgtgatcaatcataaaagacaaaaaaaaattagtacagtttcccatgaggtgtgaggttttttttccctaggttttagccaacttcatatagtatcagttcaaagagggggaaaatgcaaaaggttttcatctactaagctttacatataactactatatgatgacttaagctattggattttctgcctgttaatgtacagcgtgaacattatgaacaaggaaaaaaatgttatattggtttaaaagtggatatggaaaatttaatgtgctcaagtgggaacaatggcatattaaaaaaaaacactcatgacacagatctaataattcacttgcccctgtaggagaagggtatcaactctgatactggctcacagtttatttttatatacacccctggtccctgcagtataccccgtgtgtgggttccagagaaaagaaagaaaataacctgtagggaaatcagcctggaaacctttcattaaatacattgtactttgtattgtgtctttcacagactcttcaagaaataaaggaaaaacctgttatcagtctgcatgtgtaaaatattgtatttgaatactatcatttgttttaagattaaggctgaggctgcagacatattagttattattcacttacatctggtagataatgcaacagggatttaaaaattctttttccatttatagtccctgccatcctccccccaccatgaactgtaaagatactactttaacttaaaactgtgcttgctaaaatatttcaatgttggaaatgttgcctctttatagaggattagggttgtgagggtaataaaatcagtcttgaatttcttggcggagtttatctgtcatttagcaaaagatgcctttctagggaaaattgaagaaagtgttaaatacattcttttatgagaaaaaatataaatggtaagagtgtaactgtgaatagtgacacctttatcaagttgaatgtcctttggagtgaggctttgtcttgtcattatagttcatgtattgctgttggtgggcttttaaaatctataaacgtcttatcttttttgctgactattcatgcaggatatgctaggcaagccaactgtgacacatactctgcctatacttgtagctgcctcttggatgaaaatgaacacatatcttaaaaccaaaccttgggtgccatatagcagtatttaatgaacttctgggattgcagacagtaagagccaagttttgatctcacatacctgggaacacattgtcctacacaatctgttgaaagatttattatttctgaagtagcttgtgttaaaaaccttgttttaagtatagagggttgtaagcctatcagtctcagcaaattgataccttttttcacgtctgttagactcagtgccacctcttgtcctgaggacagatatagcacattccactccatattaggtatccttgctaagaattctttttttgggggacagagtctcgctctgtcacccaggctggagagcagtagtgtgatcttggctcgctgcaacctctgtctcctgggttcaagcgattcttgtgccttagcctcctgagtagctgggattacaggcatgcggcaccatgctcagctaattttgtatttttagtagagaggggtttcgccatgttggccaggctggtcatgaacgcctggcctcaagtaatccacctgcctcggactcccaaactgctgggattataggcgtgagccaccgagcccagcccttttcttttctttttgtgacagggtcttgctttgtcgctgaggctggagtgcagtggcatgatctcgctatcttggctcactgcagccttcacctcctggggttcaagcgattctcccacctcagcccctgagtagctggctctacaggcgtgcactaccatgcctggctaatttttgtattttttgtagaggtggggttttaccatgttgcccatgctggaaaaaaaaaaaaaattcttgaatgacttgagggtagggtttttgaaaaatagaggtgtgctgttagatgtagaacttctcaggtgaaacagcccctgggtgattggttaccatggtcattgtgggtaaactcctgatttggaagtagttgctccagtattcatatgggtcattttggttcctttctggcttcagaagcctgtcaattgagttcttaagccaaagaccaagttaatttagagatgtcgatgtcagtaatttaccttctgattgtcagtgaattatttaagaagtatcttactatttttctaaggtgaatgagctttggggagaggtttttcataaccaccatctctgttttacctgaatagaaagagcacaatcagcccatatctgtgactacacagggttggccctgatcttagggtggcagtggatgagcatccactgtcaactctcctgtatctctgggtgttcagtgcctcgcattctgagatttggcccataccttccaggttagcattgagccatgggactatgttagtttcctctgctgttgaactgctttaggaagaaaagacctccttgtttctggcggtgactgctgggccttacattcattttgggtcaagtaattcattgagcaaaaccgtaggctgtaggttaggtatacagcttctcctccccatagggtttgtgtaaatttcccaaggcctgggaaatttctctgtaattccggagggctccacttatcctggagcacccacttagagcctgaaaatgccacaggttggtctatacttcacagcatcagggttttctcacgtttgcaagcttcaatgacaagctccacccacatgaatcttgtaagtggtggcagagcttgctgttatccagtgcttattgtgtgccaggcattctgctagatgctttacatccatcatcatttgctctttacattaagctggcgacttggagactacttacctcattttgtagatgaggaagcggtgtgactagtaaggggcaggcagcactgggatttttagatccaagcctggtctcattcccaggtccgtggcctttgacatcacatcctttaagctgcatggcctccctgagctctcctttccgttggctctcatgcctgtgcaatgattccgtccctgatttggggtcctgtcacgtgacccccatcacttattaaccaggtgacactgttagtcttttcactgactgagtggcattttccctgtcagtaaaatgggagagaatgatccttcttctttaacctgttgttgtgaggagtaaatgagataatgtctctgttatttattagacacctattttatgctaggcactgtgctagaacttccagtacagcagtgacacgaacagacgtggtccctgctcatgaagcctgcagacctgtaggcatggcaagacacttaaacaaaaagcgcacttagttttgtgctatatgtctgaatcatatatagttgttaaggcccaggaactttgacttcaagtttaagctgcagcctcagcaggcactatgcttttccagggtcctatttgtaattcttacagaagacccgttgctttcttttatgttgcctaatcctcttccattgttccccatttcaggtctctggaagtcagaaacctggaagttccgccccctacctacttctcagcttcttcttcccctcttctattctcctgccactgtctgcgccatttgtctgtttcttaaggtttcctgctctgctttctgtctttctctcgtttctgaaccctgtttaaattcaacgcttgatttaataagatcttagtctagtctccattatttcaagtcatatatcgcttttgataaattgtctttttaagcacttatcctaattttgcatttgtttatgtaggcagtttttctgtttctccaattagactaaaagttctttgagggtagggaccacttctctgtctctctggtacctatcccagctgcttgtctgttttcaaatacttactgagttaggttggattccacccccctcattctcttctctggatcagctctttctctttcatctctttgcctagcattttcatttattctactaacatgtgcatttggtctatcaaattgaacatatcccaaactaaacacatctccccaactctgcattttttccttatttccaattcttgttaaatgtctctgttgccattatccaaatcccttttgcctcagtttcttgtaacactcccgttttctcaccatcttctgaataggaagattgatttaaggaaagattccttggcatctctcataacttccctaccttcactgccactacttggtggctcttactgacttctgtgtctgaattgcatacactggcctgtcatggtggttcacgcctgtaatcctagcactttgggacgctgaggtgggtggatcacgtgaggtcaggagtttaagaccagcctagccaacattgtgaaaccccgactttactaaaaatacaaaaattagccaggcgtggtggtgggtgcctataatcccagctactcgagagactgaggcagaagaatcgcttgaacccaggaggtggaggttgcagtgagccaagattgtgccacttcactccagcctgggtgaaagaacaaaacttcatctaaaaaaaaaaaaaaaaaaattgcataacctgcctcttcacttcttgccctgatagatttgagcatgtcggatcttaaaagtctttgatagctactgaagtattcactagtgaaataatgtcatgttttggattttctttaaaattatccagtggaggagagagctaaaggggattttgggagaggtgaaacaagactgaccatgtgctgataattgttgaagttaggtagtgagactcacagaggggctattatactgtttacgtttgtataatacatgtttgaaaacttcaataataaaaatttgaaataaaacacagcaaattttggctttacactgtctatagataatatatgaacctcttggcagagcatacaaccctctcatactttttccccagtgcctcatttggcttctaatctccctcaactctgtatacaggctgactctactctgaagccatttctgtcctcagcattgatctccggaaaggctcagctctacaaaaaaaatcctccctggcctaatttactagcctgatttgagttttctctcccatatcccttagcatgtaccgcccttaggggcctttcacattgtatgtaattgtttccttgtgtctctctgagcactgacccccagccagttttatcccagtactgaggactgcccaaactgagaaggttctccccagcctgccagtatttcagtttaatactcattgcatgcctactgagtgttgggcacttgatgaatacttgagatttaattgactggttgcttctggtctataatatggagagagtctaccatctggctttctgggctgacgttggctgtacatttcatccctctccctcactcttacgatcttcctagattctcctttgggaatgaagtatataatgttcagagatgcttaggtagactatgccatgtaaggtagccagatagtgattggcatgtcaaaaccctttgtccagtctcttcttaatggtgactttaaaaattgttaggctctgtatttacacttgttaagtccctctttcctctctttggttcatctttactccataaaactgggtaggggagttgtttttttgtgtggggagggcaacctccagccagctttttgtgagagcccactctaaagcccctacactagactcttcaggaaaagcaaagtaaccttcccaaaccatttaattcatttcacttatttctggccatttgatgattccaaactccaacaggacctgtagcccagaggtaaaagtagaagatgtttaaaagatttgagaaatgaactaatttttgtggtctggagaagtaaagaccaaggtatgagttaatcactgttttcaaacacatgaaattattttgcatggaaggtagtaccagctgttagccatttgagtgaaaataaacaaaaggacttagattgcagctggagggattttagttagatagaaatttttcattaagtggttctgggtgggaactgggttcccatcccagtagattgttgatttaggtccagattggagggcagtggggcagatttgaggaatttaagcatcctgaaaatcagtcctcatgattaaaaaatcagcagctgcgaatgctcttcgtgttcagagctgcagaatgaggattcccctcatccctcccaccttcccccaagttgaaagaaattaacctcaattaaaggaaacagtgatggatggttgcagagataagtatgatatatcacacaggaaaaactacattaaaagcacattaaagttgagacagaaagcactaaaagtgaagaaattcacagttaaggttgaaaagtgatatcgtttacatctctgctaatatggagacctaacagggtacacttaagaaattatgagtgccgggcgcggtggctcacgcctgtaatcccagcactttgggaggccaaggcgggcggatcacgaggtcaggagatcgagaacatcctggctaacacggtgaaatcccgtctctactaaaaatacaaaaaaattagccaggcgtggtggcgagcgcctgtagtcccagctactccggaggctgaggcaggagaatggcgtgaacccgggaggcagagcttgcagtgagccgagatcgtgccactgcactccagcctgggcgacagagctagactccgtctcagaaaaaaaaaaaaaaaaaaaattacgagagtgccctgttgtgctaagaagtaagttttttgacttcacatactaagcttaatacacagtttcattgcccagctttaattaaggcatcattcatgactgattatagcccatggaaaaaaacctgttacttttaccaaaagagtttggggttggttttaaaatttagctttggaggggaccaggtggtgattctgtgactctgtgcatttcattacctaacatatttcagcttttctaaagtcaaattatttctgcttttctaaagtcaaatatttctatttaaaaggcactagttttgactaaaatgttaataataacagatttaataatattgagtaatattgtttccatctgtttagaaaccaaaatttagcttttatcccttcatttcaggggtggatttttgcttctccaaaatagatcttaaatcttatgtgtatattttaagcaaattattattgcattttaggagtcttagccagaataaaatctgattacattttcaattcataaaattacattgtgaccccagaaaacatcctctaattgctttagtttttacctaataagactgtctctttgtgtatgtttaccatattagagacaaaaatccctcaaatgggtctagaatactaaatatttgtgtacgatagagtgtggatagtacaaacgtccgtccttagctgcttcatcccttgtctgactctaaagagttgttacttcttcctaaaccaagagccaagatggaagatataaccttccaaaaaatcagagtatatgccacagcgggtttcgtatccttacagaagatgttctctctctccttcttttttcttccttcccttcttccccatccctcctccctccttccctccttctttccctccctctcatttatttttgggataattttgagttctttcattgaccataagcttattgtgaagaacaaattcagtttatcaaatttagctaccaaatcttaaaatttgatttttaaagtagaaagataattgcttcttattaaaaaaaaaacagacaaataagtaaagttatgtcaatttgtataattccacattaatgagctagtacatgggttaaaatgttatattagtagtttcaagaaaggaaatgtgagctataattattatatgttttctatttttgttacatttaaggtgagtcttgtaaaagggccaatgaaattgccttaagtaaaatgattattaaccaatacaatttatggcatattgacttgggtaatattaatttgggtacatgacaggatatatactcatggtctcttgtcacagatttttaggttgggttacttaccagatgaatgagtttgtgtttccacttaatttttttaaagttcaggaggccaacaatttgacagatttgaaaataaaaatgaaattgaggtcactttttttctagtggctactttggtatgccgtgcatagactctgtttcttaatgcagaaaatacaatctttatgcctgtttggagtttcaaatgtaatataaatgtcatgtatcatcataagtatgcaaacatgttttaaaacacagaattgtatggaagcaattactggcagtgagtgagctacacaccccaagggtgggttggggccaaaaaaattaaagttcctaaacagaattacttttgtgtgggtgggaaagagagagcaatgttaacttttattaggaaccaatcccagctcttattttaattctcgtcacatacttggtaactcaaataaataggtagtaaagggacattaagggactttgtgttaggattagttttccccccacttgctatagtcttccggtagggagtgattagtgttcagcaggagggcctggtggacaccagtgcatatatagctctgtagttttcaaacactaggtgttggttaaagatgatgttgccaccctttgtgacatggtacttgagcattcttttgcggggtgtgttgtgttcatttttagcagaatgaatgggatgtaggaaggttagattttatcattggaaagtaacatgctatgtagttttctgccactcaccactagcctggagaagacctgaatgatgggttctccctcttgaccccttcatgctgtatgttttatttgtttcctaacttcatataaaatcactatcatctgaaggtgatgatggtttttttttgtttttttgagacagggtcttgctctgtcactcaggctggagtgcagtggtgtgaacacagctcactgcagcctcaacctcctgggctcaagtgatccttctgcctcagcttcccatgtagctgggaccacaggtgcatgtcactatggccggctaagtttttgattttttgtagagatggggttttgtcatgtttcccaggctggtcatgaactcttgggctcaggcgatactcctgtcttggcctccaaaaatgctgggaatatacgtgtgagccaccatgcctgaccctgaaggtgattttgcattgtactattttgtgggggtatggaccacaaaaatggaggggaacggaattactctctataaaaataaatttatcttctgacattctctggagccctttgctaacaaggtttaaatggatcttttttctaaagcccttatcaccataacctctcagctagagagccgttttgggttcaactgcaggttgagctgagtgaccatctaagcagcacagggactagcagccccttaactgtgatcagaacatcactgtattgataagtgagtcttggtcaagtcacttaacctttcttccttgattttctattatgtacactggaaatgatagtatctatctgcctttgatctcatagggatgcttcaatccattaaagtcattaaagcactttaagtaaggtataaggcactagatgcaaggcctcttcattgttgttatcattactgttattttattacagtgctgtatacaaagggggcactttttaatgctaaacagtcatctcagaatatgttctgtggaatccagaagttgacagaggaccttaagcggtcaggttatctttctctttcttcttgaagccaggctctgttcctcgttgtctctgtctgttactttggagaacaaatagcaaaaccaggaacacaaaaatgaaaatagaaaattgagacaaatggggtagctgtagtctacttcgtgttatttcctgggaactgctgttggtgttgggtctcctaaagtgggaagttcattgtgcctctctggatactgatctcccctttctgtaatgtgcacatccaggggttttgaagtggattgtgggctttgattcattcccacttgcaactttcattttctttgttttttcgaaatactgttttactaggaaagagaaaaacatttgggggtagggtgggtaaagatctctggatgtctttggatagtgttcaaaggcattttgtacgagatgattgtatttcctacatcagccccttctggcatttcatctcaaatacttcctcccttgcacctcataaaaaattccagaaggtgaggtacttccatatggccttggatggcaccaacttgatgatgtccatgaaaaaatagaggatcaacgctcaccttccagagtgaagagtttgcttcctggagcatgggttcttttgatctcacaaatatcactattctaaagtaacctaccctgtcctttatcttaacattctgaagctgatgttggtgactctattggttcttcttggctaaaaagttttgctactttccatgttcattctttttaatttttggtactttgagtatcatgataaattttacttctgttaccttatttgtggactgattactctgctccaccatttacatgtaacttggtagcattttcaatttcatcagctacagagcactaattcctcaaacatgggcctttgtagttaggtggaacttaagacagttgagtgtcatggtctgaaatgtaagttatttctgttcatcaaaaatattatttaagggagccctggaataattatgagtactgaataattaagccataaataaatataaattggtaaagacatccatcatttattatttggttttccagcttccataactagaatcctgaacttacgagtatgttgctttataaattaaatagaatggtttgcttttctgactccctctccccgcaaaagcataagagtctaacaatggattttctggtattgatttgtttgtttgaaaaatcttagattatatcatagttttgtattttagaatcagtttcttgaagaggaagaatacaattatatgaaattgggattgttgtggaaaatcagagacgtatgtttgctataggtataatattagtttttcagcatcaagagtaaaacaagtggaattacctctgaaattgcagctaactattgctacctctataccagaaatattttttcatcttttcataccacatgtgaaaactttgttgttgttgttgttttttgttttgagacggtcttactctgtctgccaggctggagtgcagtggcacaatcatggctcactgcaaccttaacctcccaggctcaagtgagcttcctgccttagcctcccaagtagctgggaccacaggcatgtgccaccactcccagctaatttttgtatttttttttttgtagagacggggccgctctgtgttttacaggctggtcttgaactcttgggctcaaacaatcctcctgccttagcctcccaaagagctgggattacaggtgtgagccattgcacctggccctgaaaattcttaagtggggataagggataacagaacttcttggttcattgttacctacttttcttttttctttctttttttaaagaaatgctgcagcactcattattttttcccctgtttccctctcctccccaaatttcctgtcagcaactttgttttctgttcattagaattcaaacacaatttaaattaatttcccttgccaccttctctgtggttagatacacctttggtgagttcacaaatgactcattggactatgatgatttttgttgatttcttacatggtccaactgggttatccttagagatgccttagaaccagtggaggtgttggctgtaggattagatggacttaacgcagattactggggatctcctggtattcatatccctgtagttgctaaccaggcttggatttatcctggattggacctttttttcactatcagggcctaaggagcctttttaggcattttatccaacctcctcccagccaggccctcattacatcctaagaataagattttgtctggcagggttgaactttaaaggaccataaaccgttgtaatatctaaattttttcacccctattgaaaatgcatgatttagacccaatatgtggatgcacaaattattaaatgacttagctatttatattccacccaatagtgtgggtacatttttctgagagttgctgaacagcagtggtattttgaaaaatactactcaccttgaggaggttacattgaatttgtcttttttggcttagttttaaaatgaagctgattacttggtggtatacttagatggtctttgataggaccctctcctgtcctgccttcccccatggaagtatcattatagctatttcctatacattctcactgcaaataaaattcagaaaatacttagctcgtaagagtttctgtctctggccccgcgcggtggctcacgcctgtaatcccagcactttgggaggccgaggtgggcggatcacgaggtcaggaaatccagaccgtcctggctaatgcggtgaaaccccgtctctactgaaaatacaaaaaattagccgggcgtggtggcaggtgcctgtagtcccagctactcgggaggctgaggcaagagaatggtgtgaacccgggaggcggagcaggcagtgagccgggatggtgccactacactctagtcagggcgacagagcgagactctgtgtcaaaaaaaaaaaaaaaatagtttatgtctccaaaaattgaggtattctatgatatttatgtgacttctaccttcagttgtgattgtagaatgccttcacagatttaaaatagataccaataaaatggaattatatataaatggcatggttaagaatgattgttctcttgatttgttttcaagctatgtttagtattccttttttcttcctatgtattttgagggatttaacactgagtcatatagatagtgttaattttcatttcagtttataaacttctatcaagacaataagatttcagtgtaaaaaaaaattaaggaaaatatatttggtggttttcctcctcctgaaatcttaaaagttaccatactttccattaaagtcctctctaatatctatacagaaaacatactgttcttgaataaaacaaaattaatttgtggtccttgacttctgtggaaaaagacccttatcataacaaagtacaaaaatagtaaaagcaattagtgaattaagcctcaattccaattgcctcgattttttgtatgaaatcatatctttcttattatagaagtgtgagattatagccagctgttggagtagtaacttgtaatccatttctgtacgttggtttttggtgtgaactgaaaatgattaccatgaagttaagtgttataacctactttaaatgaattagtttcctggaatttattactgctaaaaatcagaacaaatttccttaggaatctgtgtttataacaaaaacatgaactttgaccgtagaatacttttcccattcaaatgaaagataatttaaacaatatttttaaaaggttgatttaattttacatctgtgagtataaatacaaccagttgattcttcaaagatttttgattgtgataataagattgatggatatattgtgccttagccttatattaaattggcagatttttaaataccagataattagaaatgctattaattctcagtgtagaatgctaacctaacatttttgtatgtcttgtgcggtcaatagaataatggccacccaagcatgaccaacttttaagaacttgtgaatatatatcttacataagaaatgggactttgggctgggcgctgtggctcatgcccgtaatctcagcaccttgggaggccgaggtggacagatcatgaggtcaagagtttgagagctgcctggccaatacggtgaaaccctgtctctactacaaatacaaaaaggagccgggtgtggtggtgtgcacctgtagtcccagctacttgggaagctgaggcaggagaatcttggaggcagaggttgcagtgagtcaagatggcaccactgcactccagcctgggcgacagagtgaaactccatctaaaaaaaaaggaaagacaagggactttgcaaacgcggctaatgttaaggaccttgagatgagggagatattcctggattttctaggtggacccagtctaatcacatgaatcattaaaagctgagaacttttcccagctgtggtcagagagagatgaccatggaagaatagtaagagagctctaacattgctggctttgaagatggagcatctgggccctaagctaaggaatgctggtggcggatagaagctgagaaatacaaggaagcagattctgcttttgagtctcttaaatggatggcagccctgctgatatcttgactttagcccagtgagacctgtcaggcttctgaccaatataactgtaagataagaactgtgtgttttaagccactaaattagtggtaattttttagggtagacatagaaaactaatataccttgctttgtgtttgtaatttcttgaataaaattatcaccaaactctctaaatactgtaaaggaacaaaaagctatttgcttgcatataaaattgtaatttataagactttattataatggattgttacaattaattttgcttttaaataacagaacgaacttgatgcgaccttgcaagtatgctttttttttttctttttaaaatcaagggttgctttgctaccattgtaccaggaatatagtaggcagtcaataattgttggaaacagtaaaattacatagtcaacattttcattagctattgttaatgttgttgttaacaatggagttttgagaaaggggcttaaggaaatgtaggaatgtaagtgtgttaggtcttaagaagtatctccaaacttttgacagatatttctcacatttcgatttctgtcatgttcgacagttgtcaagaaattgctcaagggtttattggactcaagcgccagggcatgagtgagtttatctctgtcttgataagctggacactgatggtagccagaaagtagtggtgatggggagttctgattcttcagataatcgtttcctatttagttagaaaatgacaggattcaagatgttgtaccatatagcaagagatttaagatcactgtaaatacgtataataaattaggtaaatctacatgcttttaaatagcttttaagctgcttgtctactttcatggctagtatgttggaacattcaatcagaagtatttattgagtctgtctgtactaggcactggggatataggttcaaagagccctgccatcatggtgcttattgacccataagaaagaaattaagtaattactagtgttggaaagtagtacagggcactttaggaataggtagttaccttcttgggtctatttttttttttttttttttgagacagagtctcgctgtgttgcccaggctggagtgcattggtgtgatcttggctcactgcaagctccacctcccgggttcaggccattctcctgcctcagcctcccgagtagctgggactacaggcacctgccaccatgcccggttaattttttttgtatttttagtagagacagagtttcactgtgttagccaggatatttttgatctcctgaccttgtgatttccccgcctcagcctcccaaagtgctgggattataggcgtgagcccctgtgcccagcctaggtctagtttaagaaaccatttctgaaggcaaggggagaggttcaggaatgaggaaagaaaaaagctttaaagcaaagaaagaatgtctggagcagagaaaatctgagatcactgtgagaaggtgataagatggttaggttggcagagatcaaatcttacagggtcctcttaaatgattttggaacctcagctgcaatttgaagaatgtattggaagggagaaaaaggtgactccaagaagctgaggtaggaggctatttcagctgtcaaaatatgagagtctgtaccagagtaatagagagaggaatggaggatagatccagagacagttaggagataaactagaaagatttggaggttgactgcatgtggggtgtcagagaggcagggagaggtagttggggaaataaaataatcatgccaacaaaaaagacatattatccacagcgaagagagagagaatataatttattattgagtaggcataaaaagattttgcaggtatgtaagatatctcaaaagtggctatgaagttggggacaaaatcacagttaatacagaacagcagaagaaagtatattcttaataacttctcatccctttgagagacaaagaaagggttgtcccttttgatagtcttctgtacatctcatgagagacacctgagttaatcccagagggttgtttttcacatatctagcgttggtttggcacatgacttagacgtatctctacattgtaaaaactggagactgaacttaatccttagagagatttatctctgttccaaaggttagagtaaggactcagattcacaatgtctccaaggaaacactcctaagaaaagcggagaaggataaaatggtcttttataaatggagaaaatcattttccaagccctcaatagcagatggtgccatttactgaggtaggcagcgctggaggaggagcagatttgaggagtaataagacagacacttgggaagatgtcaagtttgaagtttctattagacactgccccggaaatgacaggagtgcattcatagtggagaagggagatctaggctaaatatagacatttactagccgtcaacaggtagtactgaaccctgggaatgtactgggtagcttagggacatggaacggtgggatggggaagaaaggatgggggggtcatctcttttgtcatataattgcatagttagcatagtgatattaccctaatggttaagcgcagcagtggtcgacactttcatcttttgactacttttcctggataatgtagctaaaagtttacatcacctactcttgtaatctagactcctgcccttttctgttaatagggtatgttctgaggtggtgtccccccacagcctcctttccttttgttcactgattatgcattctcttcagtcccctgggtctcctgtggactgttttcctgcacccagtgtgcttctgcctccctccatttgaggccatgtgtcttctcatgctctcttgctctctctttttgaactgttgcttatttggaaatattttcagttatttccacacataacttctagatgtttatacctttttacagagtcaggtatcctttttctggtgtatttatttggtctggaatgtgtcaggttttgaggccacagcacagatgctttgctctcccataagtgtgggcaatatgtggagaatggctttgtgtggattggaagtggaggtgaagggggaagtatcttgttgggaagaaatagctgactgtggccctcaagtgcttcttgggtggatgcatttaataatgatcttagtgaatcagttgctgcatattgaaaacaagatggctggggccgggcgcggtggctcacacctctaatcccagcactttgggaggctgaggcaggcagatcacctgaggtgaggagttcgagagcagcctggccaagatggtgaaaccccatctctactgaaattacaaatattagctgggcatggtggtgggtggctataatcccagctactcaggaggctgaggcaggagaatcgcttgaacctgggaggtggagcttgtagtgagtcgagattgtgccactgcactacagcctgagcaacagagcgagactctgtctcaagaaaaaagaaaaaaaaatgactatttgaatctataactgaacctataattggaaaatgaaatatggggtgggggaaagaccctcccatttgtatttacaagaacatttagatctggattaaaatagcagtgacctttgctctttattatatcggacaggtcagtttgcaagtttgttgggttggggcaacttttctgaatcagactcatgtactgataaattctgcacttggtggaggaggcaaaggttcttatccagagacactttagggaactctggggtttggcaagtaggaaaataggtagaaatggcgctcagggacatttcattttgtgatgactgactgtgagctgaagataaatacataaaaaggtaggcagtgatgccttggacaaagattttaccaactggcagtgtgaaatattctgtagaccaccagttctaatgagtttatcttagacagttctgagagtgtcggttaataatttaccctttctgagagacagaggcagcaattacaggctataagcgagcactctgaggcttcttgctttgctggagcccatctgggctggagccatggaccccattggttgtgacacaagtaccaagtgtctgcactttggcatatggaggcttcacagcgctcagtaaggcatagacattcagtgtgattcacttcaagtgatatctaaagtatggattactgtaactacccatctgctccacatcaaaaagaatagaactctgtatagatatttttaaagtttattttgaagtaggatggtgttctatatggaagagagggtggtggtggaaaaatagattattttgaagaaatatttatgaagcttcagagaagggacatactgggcttgctgattgatacctggaatatgcttttattgtctaacaaaatattggatccagctgtacatgtaagacttacccgttggcagtgtgattgatactgttaaaaacttgagtctgtttaccccttgccatacaatttgttttgatgcaatagtgaacacaactccactgtagatttaagcactatttatgtgaattttatttccctgtttagtcactgaatcacattgtagtgttggcatgataagttttgtaatttgctttcccgtgtgaagagtgcttttcttgaaccaaatgttgacttctgcatacttttaaaagttaggctttatgtcattacaaagatttacagttatttaataatgatttattgcagtaatttattctgccagctgtggcacattttcactggaatttgtaaatcaaatttatatagaaatttaccaggacatgcatttcaggatttaataaaatatactctaaaatctttttgaagaatgtagttttatgcttacacatttgggattaagctttaccttaacagccattgttactattcaaactgctgtgtttgtcccacagtcattgaaaagaagagtcaatgagatctgttaaaatacacagtttcaggtcatctactttgcttccagacctttagtgtcatgttatatttgacctgggatattcatatgatgttgagggacatggaaacatcctgacattaggctctgtgcagttctgtaagttttaatcatattaaactgtgcatccagaatcataactgagagtgaatgtagtgcactgtattcatttagaaaccctaagtgtcagattttctctccctttttcaaaacttactggctaataaccatgtggaatacatttagcattggctgtgccagctcacactcctgtagtttctttggaatgcacaaatacggcaagttattgtattttctttcttattttaaaaaagattgttgcgattttgtttacttgatgatatatatgtttctagagagagaatctagaataaaaagaaaactatacagattattttgtaacttgtgtgtcattaaaaaaatctagcaatttgagaggctgtatttaaaatgtgtgattgccaagtaatttgtaagaatgacttgttctctaagactgcgtaagaattttacttctaagattaaactactaattcacagcttcagtcagctggttattttgtgtacaacagcatgaaacgtctcatttgacttaactactgccgcccaaacacattgacttcattgatcagttgttttaatattgtgaagatacagtctgaatgtgccctgaagctaaactttcaggttatagttaattgtatttaaagcagtaggctttggactatctaaaaaggaagtgaaagcatttgcaaatattgtagcctttaatttttcatagtagtttgtttattatgttcaagcactggtaaaacataacttaacaaaacaaaattttgagccaaaacagcttatcatctgaaatgtaaacccagtttatcttcggatctcttattttttaaaagacgtaatttcttaaaagaaattattagaacagtcttcagctaggagttcaagttaccgtacataaaaaactggatctttatgttattaagatgaaaatatttttgtttttagagtcttgctctgttgtccaggctggagtgcagtggcgtgatctgggctcactgcaacctctgcctcccggattcaagcaattcttttgcctcagcctcccgagtagctgagattacaggcgcccgccaccatgcccaactaatttttgtattttagtagagatggggtttcaccatgttggccaggctggtcttgaactcctgacctcaagtgataaaactgcctcggcctccaaagtgctgagattacaggcgtgagccactgcgcctggctgaaaataattgttaaaaatctttaattttatatatacatacatatatatatatatacacacatacatatatatatacacatacatacatatatatatacacacatacatatatacatacatatatatatacacatatatatatttgtgctggggacagcagctttatatttctagaacaataataactttttatatgatttatgactcttcacagtgtttgatatttacttttattttgagaaaaattaatctgcaatgcaagggaagtcgagagatagggagatttcttgaaagggagcaaagataagactttttcttgagagagttcattgctgatctcttagatgtgatactgtgttttccttgaaagcatgtaacatttgtgtgctgaatggatcatggagaacgcatgagctccttagtttacatttactcatccagtactccagtgctcacaatatactagggtttttttttttttaaaccattttcaatgcaatttaagagaatattttagaattaagttttcacagttttgtagttttttttatttcacagttttgtagtttttttttagacttcagtgatgttttaaatgttttccttgtgcttacctggaaaagctttttaaatgataccaatttggaatgttaaaaaaggtataattctgggatgacagatatatttaatcttgtgggtgaatttagactgatggttggtgaatgctttgagagtctgaggtgggccagagaaaaaagacacaactctgtacttggttagcaatgcctgccattgccgctgaagtaccagtcagtggaagcatctcctgaattcatctccctagcccagaaacttctgtgttactgtaatcattcatttattcatcttgtgttcattcattcacccaaatttttcaacatttctgaatatgtggcagcatgccaagcatggtaggaatatagtggtgaagcagacatgaatttgctttcaagccttgatgagtgggaggcttaatcgttcattaacaaagagttgaaaacagggtggcagcggttttggcaagaatgtgttacggtctaattcagagatactgaacttgggacctaagtaagaaggatattctgttgtagaaatctggcagattctagagtttgtttgagagatctcttgcatttgctcattgggtatgccaggcattctggagggatgcccattcgcatctgacaggatagatgatctactggtcaaatgtatagatgatgtctaacatctccgtaatgcaaggcaaaagtaggttctgtaaggggaatgatatgacattagtttagagatgagtggtaaagccatatgctgttgggtgtgatgccagtcagtagtagatggtagagaattgaagatagagcataattttagtgttcagccatttttaatttcagaaaatatttttaggtagaaatattttaactgtatagtacatgtattggtacaaatataagtatcaaattatatttctaccttcaccattttttccaactagaaatcctataattatcttttgcttcttttcccttagagctaaaattattttaggtatcagttctcgtagattctttaaaacagaaaacaaaactctaaattgttaatttatttctcacaattacctagtttaggtcctcatgctctgtgatgggctgtccatttcctattagtgtctactatagtttcaagtgtaaatgcatgcagtgtaaatgaatataaaactgataaaattcctcgttcttagagcttatgttctaggggaatatttgaatacaaacaaatcccctaatttaatacttctgttttctgctgcattcaccattcctagatgaaacataacttctgttacttaactactgtgttcagaaatttgaagtccaaatttcaaggcctctacagtttgcctgtatatacgctttctaatctcatgtcttattaaataatatctttcatctatccaaggaacagtgcatctttacatccttacactattttttttttttttttaaagcacaggatctctctctcttgcctaggctggagagcagtggcacaatcatggctcactgcagcctcagccttccaggctcaagcaatcttcccacctcagcctcctgagtagtagggaccacaggcatgtgccaccacacctgggtaatttttaatttttttgtagcgatgggatctcactctgttacccaggctgatctcaaacaaccgggctcaagctgttgactttcccgccctggtctcccagggtgctgggattattatacttttattcgtgcttcccccacccatttggaatgttctcttctctttgccttttgatattctccttagtctaagaatcttggctcaaattgctcttttaaccaaataacgtatgttcctggatatattataactaacaacacgtgtactgatttgtagacttctacttttgtaagagagtgcttatttacatcttttatttaacttgtacatttacatatagtctctccagctatactgtaaatgatgtgaaatcagaggactttgttttaaatattcatactgggctaatatgagcacagttgaaaagcaggcaggaactgtgctttgagcatcctggagaatgaaacaaagcttacaagcttacatactgaatttctaagatagtcattcccccatatattgcttagaacctgaaaattccaaaactctctttggttttcagggccatcattatatattaatttttttattttgttaatttcatatatatatatatatatatatatatagtataaaaagtgaaaaaaagtacagaagcttacacagagaaaacaaatggtccattgcttttttttttttttttttttttttgagacggtttcgctctgttgcccaggctggagtgcagtggcctgatcttggctcactgcaatctccatctcctgggtcctagcaattctcttgcctcagcctcctgagtagctgggactacaggcggctgccaccatgcctggctaatttttgtatttttagtggagatggggtttcaccgtgttggccagtctgatctcgaactcttgacctcaagtggtccacccaccttggcctcccacagtgctgggatacaggcatgagccactgcacccgggcaaattctcctttttttctgtttactggattccttctttttaaatgtttaagacaatgtctcactctgtctcccaggctggagtgcagtggcacgctcaggactcactgtagcctcgaccaccccgggctcaggtgaccctcccacctcagcctctggagtagctgggaccattggcacgtaccaccatgcccaactaatttttgtattttttgtagagatgggttttgccatattgcccaggctggtcttgaactcctaggctcaaacagtcttcctgcctcggcctcccaaagtgctgggattacaagcgtgagccatcacacccagacttatttgccagatcctgaaaggtatttctagcaatagcttagccccattttagaagtatttgttacctcctcagtttttcttttctactctctctttctcctgtttttctctttctccataaatgatagtacacagtatttactgttctgcatcttgccttttactcatgttttgtttggagatgttgtttatctgtatttacagtttttttttccattcttcttaatgactacttaatattccattggaaagattcatagtaaaataaaatagcaaattctagaactgggaagaaggcaaatgttaggcaaacaattaataattataactaactatgaaaggataaaatggtagatagttgaatttaagaaaacagagccttcccagagctcctctttcccatgccaagtcaagtaggaagccctaagcacttagaagcctaaagatattaccagatattaattgatgtttaattatcaagaaagatatgtcctgcttaaaacagggtaataggcagcaccttttcagaaaattcttgtctaaaatggtagaaacctggagaggcaatgctggatatttggatgagcacatattttgaaatcagaccaacttggtcttgaattcccagtttgacccttaatataagacttcggccaagtgactaaactctcttagcttcgatttccttattggtaaaatgagaataataatacctatctcagaggacttgtgaagaatgaatgaaaaaatcttttatgttttgcatagtacctggcacacaacaggtgctcaataaatataaagttccatctccttgactctgtgcccttccagaatgattaatttcctaagagctctggatgctgagattttactgttaattgtatcttttataaaacttgcaatgtcttgtacatagtaagaagtccacatttatgtgtagatttattctgtaattcttaagagtctggcttggttttcttgaaacttttcatgaaatttctcaaatctctagaagcgggtacaaggacaattaattatttatgtaccctgtgaagatgcctaacttggccaaatgtcaacatctcaagcagtggttgtgcttgtaaaattttaataatctgtactttcgtagtatactttgtatttctttgcgtggtgtgatattttgtatattttaaaaatgggaagaatttcagatgttttaatatctgttaggtggaaagtataattctttttcaattacatggattaattttttttttttttgagatggagtcttgctctgtcacccaggctggagtgcagtggtgcaatctctgctcactgcaagctctgcctccagagtttacttcattctcctgcctcagcctcccaagtagctgggattacaggcacccgccaccacgcccggctaattttttgtatttttagtagagacaggtttcatcatgttaatccaggatggtctcgatctcctgacctcatgatccgcctgcctcggcctccaaaagtgctgggattgcaggcctgagccacactgcccctggccgaattttaagtttaggccaggcgcggttgttcacgcctgcaatcccagcactttgggaggctgaggagggcagatcatttgaggccaagagttcgagaccagtctgccaacatggtgtgaaaccctgtctctactaaaaatacaaaaattagccgggcgtggtggcacatgggtgtaatcccagcaactctggaggctgaggctcgagaatcccttgaacccaggaggcagaggttgcagttagcagagattggaccatggcactccagccttggtgacagagcaagaccctgtctcaaaaagcaaacaaacaaaaaacaaaaacgagtttaataagattcatagggttaaatgtggggggctctgacactgattgcagtcaggttcaacatggccaatatgaagtcaactggcttgtaagtttcctaaaaatttaatagtcagttctcacaagtcgcaaagagtaaatctggtatactactagattatcaacctcctgggtgactgctttgagctccggtgtaaacatagttaggagaaccaattcgtgaaaaatggtccaggctttgctaccagtttattctttgactttgcctcagtttccttgattgtatagtaaagcaatgggattagatctgtttcctaagattttttggtatgaccttacaattctgtgtgtgtaaggctgcagaagccaaggagcccaggctttatacgacttgtctcatattcacaatatcaatatttttttcttttcaaaaaaggtctcccctagttaaagcaaatatatttgagaaccactgttactgaaaaaatagctgtctcaaagcccatgtctgtacttccagcagggcccctgatacagtcacatgtaatgggtttacttattccttatatatatactacagtaaacaatctagggtttaggaaaacggaaaagtaatggaatgcaattcagtgttatttttatcagagacaggcataatagaaaacattttggtacttgatactttatttaaatatgactttcatttatgtgtgaatgaactctccatatatgctaatggatgcttgtaggccaggcatcatgaacttagatggcaatagtggccaggcaagtaaaggaattgcgagaacctggtagggtataaaatgaaagtacgtgctgcagagagtagtttctactcctcccttgctgattgttgtcaggaaggaacatacgtttctgttaccatatctttaattctttaacgcctcaccttttgcctctccctgcccattccctcagcagctgaatatccatattttaatttaaaatttcttgtgttttacatgttggtcattaattaaacatatgcacactcatacacactcacttaggaggagccaagcaaaacacatctgaagccaaacttggcctgtggtcttctactttgaaatgtcttttcacacacgtacctacgcagcaactgatactttagtacttgtatgctaggcgcttggctacaccttttgcactaataaaaatgtttaaccttcacaacaattctgtgaacaggtacttttatttccacttcagagatgaactttggataagtaacttgccaagatcacacaattagtaaaaggttctgcagttattcaaacccaagaaattgcgctgcagaactctgacacttaagcacttggcaaaattgatttcctggatatgtttcttctatatatgctctaagcacacacacaaaatgtaaataacactataaaggatgaagagaaattgtttactattagttcattcatgtacatatgtttgcatatgtgggcatgatgtgataaagcactgaaatgctataagctttcacattttacacagtttttctgataaagctcagtgagaccagtgtaaaaatttcacagggagtttatatttctccttgccacaaactagacatcctgagctttggggccaacgttgtctgtgtccaagggcaaaagttctctttcttctcattgtcatatttaaaccccacccatggaaatgctccaagtcctgagtgatgatcccttcctctgggcaagggtatgaagaataaaagtaaatctagcaggaggagtaaatcccagaagacagagataagtacttgaggtcagagactgcgtcttttatagtttgtctacataccaaactcattaatatgaataatcatcttagcagtactggttgtagtagcaaaagtaatacaagaaaccagtcttctcctatatttttacattagcattcattatttgtaggatttgggaggtctttttgagaaagtgatgtgaaactaagtctctcccacgtttttcctttagttccactttttcataccagcataaaatatttttcaaccttaaaaactgcagtctaggccaggcgtggtggcttacgcctgtaatcccagcactttgggaggctgaggcaggtggatcacaaggtcaggagattgagaccatcctggctaacatggtgaaaacccgtctctactaaaaatacaaaaaaaaattagccgggcgtggtggcaggcgcctgtagtcctagctactcgggaggctgaggtaggagaatggcgtgaacccgggaggcggagcttgcagtgagcagagatcgcgccactgcactccagcctgggtgacagagcgagactccgtctccaaacaaacaaacaaacaaacaaacaaactgcagtctgtaggaataaaagtataagatggtaggggaaaaaaaccgagaatagtgtgaacaaaatctatgtatttatccatttaggtttttcccctggggtattttggaataccctttgacaccataagcctctttatggtttactcacttggtatggaatgggggagaaaaaaggagccagtccatctggcagtattcctctcaacaccctatacccatcatgtgaatggaaagaaccccaaaccttcattttcagaactgtatctcagcctctggctcctgaagaaaaccagtgtggttcagatgtgggatgggaagagtggtttgcattggcatcagccctgcgggtgctttggggctggagcacacacagctgtgggttacagatgcttgctctccggtattaatgtggccaacatgtgaaaccatgacacccacaatactacacaaaggtccacgcctctgatagtttgagaaataactccgtctgaagaaattcctttttgaaggcctagaatacattctagaatggaaggtcctctttcagaggggtagaaccaggaaagagatgccttataatgttggacagagcacagggtgtctgtaggcttaggagctttaaccaaacatggggaaaaaaaaaagtaaaaagtctcctctaaaccttagattaataaattcgaaattctgtgctatgcatgtagcagaaagcttgtacactcaagtcatcgtgtagtttctttggagatgtcaaatgcaagccatcgttggtggttgtcatctggcctgactcagggtgtgttagaaatgtttccaccgatttttatttccctgagctgtctccaaggatggtagaaccagaggaatctatacacaagagaaaagaaatgagcatgggttcttggtaatttaataactaggactcttttcagggtgtggggattttgtcctttctcactcatgaggtccatgcttccttctgacagtacacttgagagagctgagatgtttccatcccccattcagttagtgagacagttttctcattcaggtacaatttccagtgaaatagtagcttataagtatccagaagttagtttattgactcttattgcacttctgagcacctaataaataatttattagtctgatggatatgtggctacctaactatggggcatgaaatatgcactgtttttctaatatactgtagggagacctgtttataaagtatttagtattggttttataatgcactgttgacaacaggagaccacgaagctcaaagatcaatctcattttggcccacagtattaatgctgctttataaagctctatgacaggtcacttagacagtggtcttcacagaaaggactctgttaggaaagcaggctgtaggggctgctagtatagtagatgaatgtctttgtctgtgtccctaaggtgactctggcggttgctgatgttggccaggtgatggaacccatcatttccctgctctccagagggattctggactagaagtgctgagttctgctaatgcagaccttgctaattgggcagaaagctggtgtgactttggaccacaattgcagttctggagacagaaatcaggcaataaggagtggaacttggctctcttcagctttgtcttatgtttattaatgaagtgaaattattccacatcttttatgcctttgttcaaatcacataggtgacatagcataaagtattttgatttttgttggctttggggaatttcctagccagaaataaattcatagacattagaccactacatactaaacacttcgaatttgggaaaacctaaacaaagactaagtaatttcatccaaaatcaattctcagtgttttactttattttcttcataagaactatacactatgagaatgctgcataatgacaatgatttatatcatactattgcccatcaaggtatacgtgttgttgtcttttttttttttttttttttttgagatggagcctcactttgtcacccaggctgcagtgcagtggcgtgatctcagctcactgcaacctccacctcctgagttcaagcgattctcgtgcctcagcctcccaagtagctggaactacaggcgtgtaccaccacacctggctgatttttgtattttcagtagagacggggtttcaccacgttggccaggctggtcttgaactcctgacctcaggtgatccacctgccttgtcctcccaaagtgttgggattacaggcgtgagccaccgcacctgtcatggtgcatgttttagagcaaggtatttttctctttgtgtccagaactccttgctggttctaagtatttcacttcccaaactgggaactctgagctatactttcttggacccagtcagcttgtttattatttctcacgcttttgtgggaaccaggctgagttctactatttgccatttctgttactcatttcttactgattcagagtttcattttttttttttgaaatggagtttcgctgttgttgcccaggctggagtgcagtggcgtgatctcggctcaccgcaacctccacctcccaggttcaagtgattctcctgcctcagcctcctgagtagttggtattacaggcatgcaccaccatacctggctaattttgtatttttagtagaaacggggtttctccatgttggtcaggctggtctcgaactcctgacctcaggtgatccgcccacctcggcttcccaaagtgctgggattatagcagagtttcattttaccctttccagttggacccaatgttttcttccttctagtactcctcgattccttcctatcatgtctcccttagcagatagccccatctttaactttcctcagatgattattttgttcatgtagctgttatttattgagcaccctgttagaccctgaattaggaaagataaattctgtctcttttaagaagtgtacagtttagtggaaaaaattggtaataaattggttttctaacatgagcagttttaatatatgtatttcttaaccacagattttttttctgtatctcttacctttggtttctgagggaaaaaaagggtttcttttttctccctccaggggcacccttttcatttgtgctcttgatcatattctctcctcggaccctttcataccattttccctctggcttagatcttcaatatcgttttctctcttggcttcatcccctttgcctgtgatagtctcttttttccctgtagtgaaaaacaaactgccaacttatgaacacaacctgtctgagctcctctaacttttcagaccacgtttctcttacttgttttctttgcagaatttctccaaagaatgttttatcttttctgcttctttgtcttcacaatttgcttacttcttaactcctctgcaatatggattctgtatacctatcagtctacaaagacattcactcttatgacacaaagcctaataaaatattttagccacaaatatacatgaatgttatgttgaacactcattgacccgagtttaggaactaataatgtacaaacacatctgaagactagagttaccatttaaattatactgtgtcagtcactgtcaatctccctatctgcctttccccattttccatccttaagcactattctgattttggtatttattattcccatgccttttggtttgctcttactgtatttgcttctacttactatttcacttggttttaaccataccctaaatataagtcttgttgttctagatcatttaaaactctcaagcatcctatcttctgtcaactgttttcccttatcaggtggaacgttggacaatcacgatgctcctgttaacgctgttccttctgtcttttcccctaataaccatggatatcccctgagatactaaccttggccacttgttttatctcttgtttcaggtctgtgtagatggctgctggatgtgataacttcagtatcagtctgttttctaacatttccagttgcctggttatctgcatgatctgctgttccccccatactaaacttgctatatattctcacaaactagttcatccccctttctgttgataatgctaccattttcctgtgctcagactattagaactttagtgtcattgttgacacttctcatttgttacagtcattctggtccccttgattttatcttcacagtatcttctgtatcttgtccttttttttttctccagccgtattgccagtaatttacccagattattgactgattgattgagatggagttttgctcttgttgcccagggtggagtgcaatggcacaatctccgctcactgcaacctctgcctcttgggttcaagtgattcctctgcctcagcttcccaagtagctgggactacaggcatgcaccactacacctggctaacttcttttgtatttttagtagagacggggtttcaccattttggccaggatggtctcgaactcctgactttaggttatctgcccgcctcggctttccacagttttgggattagaggcgtgagccaccatgcccggcctattttaatgtcttcctaattggaccctgcttttgtcttttcacacttcagtccatctgtcatactgttgccagataaatcttcttggagcaaaataatgatcagacgttactgctgttgagaagcttttggtagtttggactgttggtagataacaggctaaatagcaactctttgtagtggagtatagggcccttacttttataatagttcctatcaaccactgcatccatttcattgatggttcttctatgtacatcttcccttatgttccagtcaaactgtattacttctctaggaatataatctacgctcagtgtgagagtgcctcggtgtagaagcttttttttttttctaaaccatactggctggaagggatctctaagttgtatggaattctgctcttgtttcttttcctattctgtttttgttaaggttgttttgttcatagcttatctcctgtactagattgtaaacttgtgagcaaggagtatgtcttaacttttgtgttctccacagcttcttatacttggcaagggagcggggcggggggctggggcgggaggatgggggtgggggtgattagtattccctaacagcagttaaaagtgtcatattaagtggaagaaaagggagtaagaaattgagctaggcagggcaaaagtgtatccattatcaatcagcaaattattcagttattcccactttgttactttagttctcaccaaagtttatttagctgttggctactatcagccttagaaactattaactcttaaaaaatgtgtttagttggtcattggtgtgttatatttgcaatttcttaaagttttgatgtactcaatgcttttaagtaatactgtctgggcatatgtaatttcctttcccaatctctcaataggcacaccttgggcccaccccacctccacatagccttaattacaaatcagaggacaggcttagtgagcaagactggccagcatatttcaaggtcccatgttgtggggttgatacatctcaaattgaggtatgttggttttttttttccccctttaagttacttggacacacttgcattctttgattacctagttaagatatatctctcacctcttctttctgccactcttttactgtctttcatacttatcctcattctatgaaactcaggtatttatttgcttcctaacacttcttgcctctgaagaaataattgaaagtagatttaatgatggttatttgaatgattttgaacgtgataaagtatctgccttctattgtttctctccctgcacttacttctcttttcctttttctattctttctttcctattgttctagggctagtttattgttatcactatttttaataataatactatattaatagtgttagtagtaaacttttaaaactgaagtttaacatacttacagaaaagtgcacaaataaaagtgtatagcctgataaattttacacactgaatatacccaggaccaccaactagatggagatacataacactacctgaaccccaaaagtgtcccttagcccagccactattctccatcaaagccaatcactatgcagatcttctaagggacctgttaagtcttcgtatttttaacttgccattaataggtttctggcatcttttgggtttcttcatttggaaaacaatctctaagttcatgaacatttgctctgtttcaacatttttcgatttaaatatgtatgtatataaatagtctctatcaaggccagtagattgcttgagagtaggagttcccagacttgcctgggcaacatagcgagaccccatctttaaaaaaaaaaaaaagccaggcacggtggctcacgcctgtaatcccagcactttgggaggctgaggtgggtggatcacgaggtcaggaaatcgagatcattctggctaacatggtgaaacctcgtctctactaaaaatacaaaaaattagccgggcgtggtggcgggcgcctgtagtcccagctactcgggaggctgaggcaggagaatggtgtgagcttgggaggcggagcttgcagtaagccaagattgcgccactgcactccagcctgggcaacagagcgagactgtctcaaaaaaagaaaaaaaaaaaaaaaaaaaaaaaaggccaggtgtggtggctgaggtgggagggttgcttgaggccaggagtttgaggttccagtgagctatgattgtgcactgcactctagcctgggcgatagagcaagatcctagctcttaaaaaataataggccgagctgggcatggtggctctcgcctgtaatcccagcactttgggaggctgaggcaggtggatctcctgaggttgggagttcgagaccagtctgaccaacatggagaaaccctgtctctactaaaaatacaaaattagccgggcatggaggtgcatgcctgtaatcccagctactcgggaggctggggcagtagaattgcttgaatctgggaggcggagattgcggtgagccgagatggtgccgttgcactccagcctgcacaacaagagtgaaagagctaggcaggccaaaagtgtatccattatccatctcagaaagaaaaaaaaaacaataggtcgggcccagtggctcatacctgtaatcccagcactttgggaggccgagagaggcggatcacaaggtcaggagttcgagaccagcctgaccaacatgttgaaaccccgtctctactaaaaataaaaaaattacccaggcatggtggtgtgcacctgtaatctcagctactgaggaggctgaggtagaagaatcgcttgaacctgggaggcggagattgcagtgagccaagattgcaccactgcactccagcctgggtgacagagcaagactctgtctcaaaaaaaaaaaaaagaaataatcataataataaacaataataataataaatagtctctgtttctataaaaatttttgaaactttaagtatactgggattttattttttaagtttatttgttaggtttgtaaattgcatatgaaggagtatcatttttagtgttgctttttcctgtgataattctaaaggcagtgttgagtttctcaataattttgtaaggtactgaactctgccttgcaatatggttttcttttttctttctttcctttttttttttttggaaacagagtggagtgcagtggcgcgatcttgggtcactgcaacctctgcctcccaggttcaagtgattctcctgcctcagcttcccgagtagctgggattacaggcatgcgccaccatgcccggctaagttttgtatttttagtagagatgggattttgccatgttggccatactggtcttaaactcctgtcctcaagtgatccacccgccttggcctcccaaagtgctgggattacaggtgtgagccaccgcacctggcctgcaacatgattttcttggatgttggtgaatctcaatcttcttttctgacagtaatttaaaccattattatgacacctttactgaggctgcaagcttcttggtccacagactttagaaggaagtaaataaagaaattaacattatcttggctgggcatggtggctcacccctgtaatcccagcactttgggaggcaaggcgggcagatcaattgaggccaggagttcaagaccagcctggcctggtcagggtttggtgaaaccccctctctaccaaaaaatacaaaaattagccgggggtgatggcacacgcctgtaatcccagctactcggtaggctgaggcaggagaattgcttgaacccaggaggtggagcttgcagtaacccgagatcacggcactgcactccagcctagaagacagagtgagatcctgtctcaaaacaaaaacaaaaaacaaagaaattaacattacctttataattcttgcaactttcatgttcatgttaatttcccgttgtgtgcgcccccagcctgtttttttttttttttttttttaaattcatttaagtaaagccatcactggttctttccttctagattttctcataaaacattgaatataggtttggtataaagaagccactgttactgtttggacttgagagaagattaataaagtcacttttctttttttaaaccaaaacaaggtaggtaaaatgtttgaccttttgtaggcacaagattcatgctgacctcagctgcttttattatctgcaaatatcttgagtctaaggattcatcatttccctaacattttgtaaactacctcatctaccataccctactcaaatccttttattttaaaatttttgtagtgcatcaagggattatggcttttggatatttccttgatgtgtttctatgaaactgagcccctgattaggctgtcagcagatactgtattacattgattgttttagttggtacagacacacgtgtcagctagagcagtttctcccttttgctgagaagggtgaagcttttagataatatttagttatggaggatgtttgtgccactgtttaaagtgatttgaccctgtgtcctcctccaaccttaagttagaaggcctattttcctctattggtctaagggcatgtaatgaagtcttcagcacacaagctttctccctccctgtaggtgagtggttattattttttcttttgtcacgggcttggatatcatgttcttatgtgtaaacactggaccatatagtactcacaatactttggcaaaaaccaaactaactgaaaactgaaggcatgcctttatgtcttatttccaacttggaccatgatcttgccccttgaaatcttcaggctgttttgatgaagccttctgtatgttgaaatgcccagtcaaggtggccagaaccatctggagaaggtagagttgtaaatatgaagtgacatgtataattctaatggactcttataatgagaggggccagtgattgaggctggcaatcagagatgacacaagctttttccttcctatttgaatctgtaaagacccttaagagcactttgaatttgttcatctataagctgttaacccaaattcatgtcccaggtttttaagagaataagcaatagaatataggcgtttccaaagaggaagacgtacagaagcagataggtgtatagttcattcattcacagataggcactaggttagatccagtagttggcgtgcatgcatcaacatgttaatcggaattaaaggctgctacatttaggcttggctagatcatctataaattgaaacccaaaagagaattgttaactaggaaagtagctgtccaggttccttaaagtttaaatacagggatccaactagtattctccaaaatttttcaggaatatcagactttactgctgtggaacacttggctgttgtaagaggagtgtttcatctctcataaggatgtaatgaaaggaaattaggagccagtgggagagtgcagggacttaggtgtaaatcataggtgaatctttttttttttttcagatggagtttccctctttttgcccaggctggagtgcagtggcgtgatctcggctcactgcaacttccacctcccaagttcaagcgattcttttgcctcagcctcctgagtagctgggattaccagtgcctgccaccatgcctggctaatgataggtgaatcttaattgtgaagatgagtacctttatgagtagagatggcttcatatcagaactttatcttacaagctactctttactcttcctctttctccccgctccatgccaacagagttaatgtaagcatagtagagtaatatttcatctttgtgtgtgtagttttcttttttttttgggcgggaggaggtgaactttttactgtctttccatctatttacatatgtgagtccagggaaaacaggcagcttaaattatgatataattttttacaaagggaaaacctgaattgaaattattgttttacttcttttctattcatttctttacagtgagtcaaaaattttttccccttaacttcacatagaaaatgaaactttacacaataaagtaaggatggcaggtttcacaagggaaaaagcttgctgtcaacttctttcctcaggaatatggaaatttgggtggattatcttttcagaagaggtttcctttattacttcttttttcacttaagacatctgttaacatttcacacagcccaacagatgttggagagcaagtcccatactttgttctcaagaaaaatgacatttccttagttggttcccccacttctgtgactgagtccagcctgctgcataatttgcatatattaagttatataccttaatgccatatgaatttgtatcttcagcattatttttacatggtaaagtctggtttgattagaaactagtttacatgttgctgtagaattaagagagggcaaaacattttaaaactctacttcgagaatggcaacctgagtccacatataagattggatagccagtttttaacatttttttctataaaataaatgaattacaaaagcttgagttgtttcgccataaggaagtgctgattgtcatgcgatgtggagcgtcatttttattattttggcaagaacagggacagttttgtcttgacaagccattagatgaataccagcgtgtgtcacatgaaaaaccactgatctttaacccagctctgtacttaaccaagccttgaaaatgaatagtgaataaaagaagagcaaaggcagagcacattacagattatagaatctgttaacagttgctgaactcaacccagggaattacaggtattgttctgtgaaccagcagaagttctagagatgcttgttaaattgtatacaaaaactacacatttattttatatttgtgcaggatttacattgttggagacagaaaaaataaaaatcctagagtactttctcagtgcagtaaatgtatgctttcatcataaaatcatatatatttacatagaactcaatgaggtttttttgcctgcagttacataacttattttatgaaagcaatgtgcttttaaagaaattaagtagaaagaagaaaacataggttatatccccttcccctcaaagaaaacaccctacaaacatacatgcaaaacaaaattctttgctcacttgcgttttcatgtattcattgtggctgattttttacaccaacataggttttttcttttttgtttctttttcttttttttttgcaggaaatggagggaaaaacccaaaacccaccgtaatactcaagtactgaaaagatcagtaacattttaaacggttgtgggaattattgcttacagagctaacaagaaagaacacacttttttactctgctggtggaattgcattgtgcctccctatagtcttgttatcccacactaactgaaatgcaaattttttgtaactaattggatctcattgagggtacatgcacagtgtgtagttatatgcaaaaaggttttaaaaagtaaaattttcctgcaattacaacttttaattactatccaaaacatggtacctatagcacaggtttagaatatatatgtctgacttttttacagattactcaaaaacatgagctatgaaatgcttaataaggtgtcagctcgaaagttacagggaaaatgtttaattacagcagtctataaattgaattttactatagttatgtgaaaataaagatttctttttaagttcaggatttagtgtattagagccagtatatgaaaggcatgttatagtgcattccttttcttggaagattttaaacgttaaaacatcatcaacatcagaagtcactttcagagccattgcctttttttccccttcagttctccaatctattttaccattgtaaaatgcttttgagtttcttactttgtgtaagtatatttctacttatgtggtgtggtgtgggggaagtattcacattcacacaatgtctttaacttggatgcagtgaaacctagtttggtggacttcataatttccatggtccatctctcactatcagtaaatgtgggaaagccaacagatggcctttaagtacttctgattctttaacctgaaatactcagaatcagcagcaaaaagcaattattgtggaagtgatacttgtcttcttccttctagttttaaataattttcatataaatgattccagagagttattccataattgtcagactatgtagccagtgaaaaaaactcagaagacatatttgtgccttgtaggtgtatttttttgtacctgtgtctgtaaaacgatacagatgtcccacttgctagatagaaattatcctaatgtcaaatgttctacacagtatgttatatgtggaagttcagatcatgtatcttggggatttatagagggattaaatgttcttttcaaatatttattttaaaatgagtgttagagaaacttaaaatcttatttattattgagtctggattaattgttgtctctttttgtaacagagcttgtcctctttgtaaatttgtgttacaaagtagttaagattttgtttgagcaaatccatttagcaggtgcagtactgtatatttatgaaaaaatattttttaaaacttagaaagatatcctgctgcttttaaggctcgtgttgtggcagtaacatgttatattgcagacgtgtttcagccagggccacctcagtccatgatatctgaaggagctcagtttgcctatactgggtagcattttgtcagaagactgctggctgggcagactagatttggatgtattagctagtcagcctaataaccctgtacagactgtattgattttctaggagagagtttatgaactaaataaacttggggttggtgtcttaataaactgcttctctcagtctgtcacatttagttacggagctgtgcagtttagggggaaaaaaggctaattctgttacagattgttcacagcagggtctccaaattagccctttgttttgtaatgccaccttgcttgggcttgctttgagcacatttctcagttttgccctaatgagttgcaacactgataatgtggctgatgatctttcattgatttcactatcacttgcttgtctggtaattgatccgttgctgagcctctagttaattatatcggctttgacatggcccggtccacggggaatttcaagtcttgcagaataacagttttaataaaagagtctattactgcaggtgcttgctgctgcatgccagttgatttttgtgttgttagtgtgtgtgtggggtgttgggtaggatacctgggaaagaagaggactgcaggactgagaaaaaacggggtgggggctagaaaaagaggaagagggagtgaaggagggggagaaagagacaaggagagggcgagtgagaggcgagagagaacacaggcaaaaacacacaggcaaagcgatacaacagagcctgagtggaaggaggaggaagcttgctattgacagtgtccttaagcctcccacaaataacagccattagtgggaaggtcaggagctgagcaggcagcttgactgaggcactgagtgccacttcagaaatcaagaggctagcaaattttagagggagtttaagtgggtaatagctagcactaaaggtacagtcactgttgacaattgactcgtaggggattttcctgccctcccccccagcaagaatatttttattgaccacaggtggacttaatatattttaaggcaacaattctttgggttcttgtttgtttcctctcagatattgaatttgcttcttttgagacttttttgtgcttaatggtggggaactggagggaagtttaacagaaaagctttcaggagatgtcggttctagaggggaaggcacatttgtgtcaacatagtgtacgttttctcatcttttctcattgtccactaatgacacagagctgccattgaagctcttttctgtttcttttgttgtttcagagagtaaggtttattgttattcttgagttaagaaggaacaaggagagtggtacatttgtcctcgatatttgtaggtggttgaagattaatgttccttacatgttaagtttaggaaggatggctttttcctgctgactacttttatgagatggcatgaatttagctttccattttgaacttactgtttatgtacagtgcattttgttcagtgctgcttttccataaataaggcagacaaatactatctaataaataggtgaatagttttaagacttgtttaattaaaaatacgacatgttatcaagggtgtatttcatcaggcaggaaaacgttatagaattttccacagagatcttgaataaaaaatggagtttttatattcattactttttgcctgaaatgggacaggctttttttgtttatctttttcttttcttaacgatttgaaaggatattgcagatgcttcatctaggaactttaacaaaggatttttttctacttctgagctttaagaaaaggtatacttttttcctttgccattcagtttctcattagctaacatccagtttagtaattaatagcctgaggtactagatattaaatagtatatatttatatttggcaaatgtttattgtgcatcttctatgttataaaaactgctaggcttatttgcttactctttagagtataaggtcacatctctatgtacgttatttaggagtttctatgtggttataaatagcccagcacatacgagatgactttcaggagctaacatttagaccataactgagccaactttacattctcttacagctgaatattttactttcttcagtgtaattaaaaaaaaatttaagtatcacagttttacaaatgttaaagccaaagactggtgtcagatattatgtgttatatcagaaagcattgttgagaaaaattcccggggaagggccctagcttccccttgccctgtgcaccgtgattgtggtgctgcctggagtgtgcataagtgtgtatctatctgtatatctggagaggggttagtgcagggtgtcatttggtgcctgacagtggaacagtgcagttgactcttagctctgctatccaatgacatgcagtggctgagagtttgaagctgatggttgggtctccagtgccgcctgcacacctgacaggcagctgttaaactgagcaaaggcaagcttggggagtcacaatctatgcataaatgatagggatatctgtgcagaaggtgcgaaagaagctctgaccccctccctcccccaaatctcccccttcccaaatgaaatgcacagttcagccagcttcttaactacactacactcctgctactggctgccaagaggctcaaaaaatccaccttcacttttcagtcagaagaggcagaagtggatgtgagagaaagagagacacagagagacagagagccaaagagggcaagagacttgactttaagagactcctgtactgacaactccatgcagttcggaaccagaacgactacggctgaaccagggttcatggggacatggcaaaacgctgatactaacctcttattcagaatgtcccaacaggtaagttactttctttcttgattttttttttcttttttttaagaaaccttgaattgttatgggcacttttgtttctggtgtttttctttctaaatactttttaaaatgtggtcacttcctagttaggctcttgttttgtcataactgtgttactggaatgtgcagggttacttcatggtttccctaagggcgtcttaaaagaaaaaggggaaaggataccgaagtaaaagaaagcagagacattgttgaaaagtttcacagtacaatctgggtcaggggaagacttaatttatttctttgttttctgttgagaatgaaaaaagccacctcccaacaaatgtatctatcaatatgaatcacttcgtccaaagtgtttgctctctcggagtaggttccgcaacctaaaaaacagtcatcaaatctcggggcccctcagaacagccctactgacttcatgtggctggaggcagcttcgttcagacctgagaagagagacgaggctgtgcaggcttggctgccagcgccgagggttgctggaggagtcggcgtgcgtggcgggctgtgctgctcggtcctcgctcctccgctccgctcctccttgccagccagccctctgcgcccgcccctgcattcccttcgccggctccggcccgctctcccgcccgcccgccggcccgccggcgcactcactcgggcgcagcctcggcgtcttccccagagccgctcctccgtcccggccgcgctggaggcgttcggcttgctggctctgctgggaaagccgacgtggtagcgcgaggccatcggttactgataattaatcaccggagccggcggctcgtaccatgcgctccgtgatacgcgccctgtgcgccggtctcctcttgcacaattgctggctccttggctccgcgggggagcgagggtgagaggaagcgaaggggacacaacccagaaactttcatcttggattgtgctcaagtgagggagggaagttccctggtgcctccctcctagacacgtcttgcttttccaaagcctacaccaaacccacacaaagcaagttagtttgatattatcatccacacacaaagcaagttagtttgatattatcatccacacagcacgaaagtactattgacaaatatacttggattttaagttgacggcggttattaagaaatgttgtgccactcaagaggaaaaaaatactgcaactgctttttttttttttttttttaaaaagcttttgtttgtaagagttcacgaaaattaaatactttgagttagatatttaaagttgttgataataaaaaaaaaacaatttgccaggctataaactactacaagtttagaaatacatttgcaagcgataatacctacaaccagggttttgtagcatttagctagagaacagttttagcacacaattctaaataggataaatgcatttgaataaggtatattttgacatatcctgtagagggaccctgattactgctgatacagtaagctgggatttaaatgcaatcaacatcaacccaataagtaactcttcatgtgcaatttcccattctttcaagtgaaaagttcatttccacacagagatgctccttgtcactgcagagcgctgtgagaggtgttttccgcgacgcatccctgcctgggtggctctcgcgtgttggaatgcagtgttttcgctaaccttagtaccaaataacttgtgcttcacttttaaaactagatgtcaccttcagggttttccttgagttagtggaggtcgtgtgtgtgtgtgtgcgtgtgtgtgtgtgtgttagaagggaagattggcttacgtctccctctagctagaaaagagttaataaaaccagatagagataatgatcaattgataaatggctattgaaccacatagatggtgttagattgcttatttggcactagcccatttccaagtagatttgaatctaaggagattttgtcatggaaaacattttaactaaaaaacaaataaagtaatataaatgatgggtcagaattaggacaatttatgatgtctttgatccagctgtctgactgtgtggatattttgtgtgtacctgtgtgtgcatatatgtgtaatggtgagcatcagtgattatatggagagaatagaaatatagggaactaatttatgcttaatggatgctattaaaactgtataatattatgctatttatgaaatagagtagtacaacaaaaggagagaaatcacagttttaaatatgttttcttttttttttggttttgatgtagttagcaatcactcctatccccccaacccacctttttctgtcatggtcactgaatgtttacctcttgtgcatttttggaaagcatgtaaaagaggatatgagcttgcattttttttctcttcaagatgacattttagtttgtataaatattacataacttaagttcaaactatgtgagtgaaagtatgtgtgctgttcatatttaatatgtttgtttttcttacctgtagttcatcagcaatgctgattcagcacgtgtgtgtgtgtgtgtgtgtgtgtgtgtgtgtgagagagagagacttattgaaattatatctctgatatctcttgaagccagccatttaaacgagtattactttcaatatatacagttacgctagtttttgttacaggtaaaagtttgtccagtttaatcaaatatgtagaattctgtacatctcattgctgaggcataaagaggtttctctagattatgattattttatttctaagtaaaatttacttagcttatgaaatgaataaaatttattgggttattttttttaaagttttctttaatagtataaaaactaatattttcctgattatttatttagacgtttgaaaactctgactagtagggctgctataaaaggtttcaaaactgagttacagataatttaccatcagtatttaactatagagaaaattgtgggaaatgtccatgaatactgaaatttaataatctagttttatgtgttctattagtaaactaggaagtagggatacaaaaatctttgtcttttgtttcatatgagcaaagttggatctgcttaaatgtacatctttcattctgtctaatagtaacaaataatcacaatctgaagccaatttagatttagtgggatgaagtatgtgcccctaaagttcaagtgaagtctatttgactacattttcctgtgcctgtacattttttcttctatactcaagtatgattttctcaaattatttctatgtatatagctgagtatttgagaacattaaagggtatgacacttgtgtaaagggagttcttctttggatcagtttgatcagtgacaggtggagaaagaaccttattttgcctattttagtttcacaaggtactgttaaaagcaaaaaatgaggcttgcttttcaaagttttttttttaatcacacttgaggaggcaattcttctatttgtataaatattttgtgcatttgagagaatagtaaataaaattcttgtagctatctcaagggatgtaatagtccagtctatttaaaaatctttttagaaaggaaaccataaaggtatatagctatagcccacatttaatgtgttactagagacatttaccttttattattggtgaggtatatttaacctgtttcaaataaaatgtagatcccttaataaggtcttttttcatacttgagtgaaatactaagttaggattataaatgactctctgcatcattatgtagtaatttaggattcacccgatgatgtaacaaaattaacaacataatttcattgtgaaactgtgtcttattaaagaacaactgtctgacattctcttacagttgctttatttaacttcatgcaaatattattagtagtgacatttttctattgtgcattagattctctcattagcatgatgtgttagttatcaccagagaaatcattttttagataggtgaggggcaaaccaagaaagctaaaaattaaatcaacgatttacattaataccagagcgtctgctcaccagagatatgacagagtaaaagcaaactttcttactaatataaaaatctagcacctttcagagaaatgataaataaaatataagaaatgtataataacattgctagaatccatttaaaacagtgctcaatatgaattttcctcaagaaatcttttttttctattcatataggccaacaatctcagtttctggaatctatatttttaaatgaaaatgtttttgtccccccccccaatttttttgagtatttattcactagtcatttaaaaggcatatatatatatagtattacaagtcagacgcctagttgtacattgtggtttgggtcttctttatagttcatacaacgcatttttattctaaactctgtcccactcaaatagacatccctttttacataggatgtatattcttatttaatcaaagccctgagtaaagcagctgatagttaatggtctttgaaaacgactttcattgccaggcatcatccatccctagcttgctttctgcagttttctccattttttactcccttccttacagttagtatgtttggatgatcttgtcttactaaaaaaggattaaattgactaaacttgtggtcttaatgctaaaataaatatttatattaagaggcatgcagttttagcctgttgaattactaggctacgacctccaatttaggcccctcttaatttgagtggtaatatgttttatttttaacaatagacatatattcaaatataattctcagtatattgtctgataatgtaacactaaagtaggaatatttgggtatttgtatttgttaagatacaaattgtagcatagagacaggtgcttggtttgtcctaaactttgaaggtctatggataacatgcagacttcacataagagataccgtctcatttgtaatgcagtgggaaagtaacagtttatatatatggtattctatgtacatgtaaacgttaacgcaagtaaagcatgcacaaacatattctcaggtgtgtattttgtatatgttaaaaatctgtgcacaaatttggagtttattttcaacatgattcatttaaatgaatttgaacacagtaggtgatcgttttgaaattatttaattttctcacctttctgtcatctgcaaacaggtctattatgtttgtgtaatttgtaaagccttttgctaaggtgagccaagtaactgcagttgaaaaataaatccctctaaggtgcagatatcttatctataattgtaggtattttttataattatatttatgagtgtatattcacattcactgataaatccaattattcatgcatagctttatggaaatctgattaatgcagtgacaggacagatttgggctgccacagcagcacatcctcccactcccatgtcagggttaagagccacggcaaatcctccctgactaattagatgctgagtaaggcatctctgagaagttggggcagaagtgaatgggtcacaaccaaggcaggattgcaaggactccagtgatagtgaaagcattcaagtttgccaggtcgttgtgacacagggagctgattccaaaggaacagtccgttacagatagtgagctggcgtcatccacttgaatgaaaaacacaaattctggtgcctccctctctctaccttgtatgcattacacacactcacttaaaaaaagttgcattgggcatctgccgtcatctgtctgcaaagcttttgagaggattttccttgtaaacgtgaatagctaatgattctgtatagcccaagaggtattttctgaacttggcactctagattagcacatatatcaaaaggaaagaggaaaagaaattggaatttgtttttagcttgtgtctataatttgaaccttagtgtttgaatcgatctaggaattaactcctttttccccccagagtgctgtcagagaactttgtggttgtagagaaaacagagtgaatcgggtaggttgactttttcagtgagagaaattttctgtgggattccctgcttgttattgtccaaagaacatggaatataatgttccaagatttcctttcacggtaggtttggagcctggtttgttatgcgtgtagaaataattcgccatttgaaaatcctcttgtacctttggtggtacgcttttgtggtctgtttatggtgctgctcagtgaccacccttctccagaccttggtcagaagattgtttgggggtcctaggaagtgatggatctcactactgtctgccaaagctgatgccattttttatttccagaaaagcagctggcttctacattttgctgggcgatcttcatctactgtaaggaccctggagacaggagaaagggagtcaaagaccctttcaagaaactgacatctatttttaagctttagagaaacaaaggaaaagagacataattcaggaacaacagcctttatatcctcacatagaaacaaaacattgggtaatagagggaatgttttcctataagaaaaactggtaaagatgcaggaaaaataagatgaaaaaaatctgctaagcagctcaaggtctaagaagttttaaaatgtgcagatggcatcccagaaatgatgtctggggccatgacatccagggtccccacatttcctcctcattgagcctgacctgtactgccatctttctccccaggtttaaagaaagtttaacgaataggaaaaataaaagtattgattattttttaatttgtgcgttccctgtaggaagcctcgcagatttcacagtgtacattcaaaccctcaggtgaaaaatttatgactggagttcatttgggtggagacagtgtgcagtgtcattctgttcaaatgctgtatgtagcatttcatgccacgaagtgcagagatcaggagaagagaggaatcgctgtatgttttcttcattcatagagctttctttaatggaaatgcttgtggaaaaacaacacattactcaaattggctagtttaggaaccaaattctcaacttattaatcatcattccgattaaaaaaaagaattgatcctttaacaacaaaataatatccttttgtttttctttaattaagcccatcagtttttcatttctctctgtaaagaaaatgaaaataatcttgaacagtaggaagttactcattgaaacaactgattctcttgagcatatctgacgtcttatttactcaatgcttttgaactgtaatgttatttcgctactgtctttagggtttatgtgtcattgagtggtgttgatttataaatctcattcatatttggttggcagaaatttacttaatgacctaaatacaaggttattctgttcctatttcctttctcatagaggtaatttctttctcactttattctcttttcttctcatctctctcattctgaattcctccttactttcactggccctttttgccttaatagaagagaattgaaatgcacctgaaacgtagcagtaattgaataaatacccttttgccaatacatcattctggcagaggcatgagagagaggtgccaccctcaggtgtggtcctctgtgagtgctgacaggactgtctcgagtgttgctgtagaagggttctttgagtaagggcatgataaaaacgtgtaaccaggggccctggcttatcattcagaggtgctgaaaggcagctcaatttgatccttagcctgtataagaaagtacttagttgaagagagattttgctttccttttttcttcttttaaaaacctaattcttggacttattattttgtgcagttagacttctacacgagcttatttccctacaagaaggaaaagataccaagggcagtgcagtaggttgaagggatgattctttcagacaaactgcagctagtaagagttaacagaaacatttaaaaaaggacttgaaatgatggtaggaccagtattaatggatggtattatgaaattaaaatttaaagcatgcagtatacataacacatgaggaggattcactcttgttttgtatttaataaattttaacccattgtctcacaaggcatacagattgttaaaattgacaagactgaaacatattctgtatgggaaagacatagctttcaatattgttacctgctgtgcttttttgagactgtcatgaatttttcaactttattaaggtgtcttttagtggctattggttctctagacagttcttcagaactcacattttatgatcggagtacctgaactgggtgtctgaaaaggaagataacaggttagtgaacgttttacatgacaacaagtaattgctttcagctggcttaaaataataacaaaactaatattaaaatgagaatctccattagaggattttaataatttttttccctttccattaacatttaaatcaagaagaatttcattgatttaaatcattagggtggctatttgggacacctgatcaggcatagattaagaaagctgcccactactgcgccctctgccagtgctggaggtcagtggacatggctgggatgtcaccggcaagatatggggagtaattatacactgagcatattcatgagagtgtccctgagtgagaatgcctgcaaacattctcattgttgacctcatgccagaacctaacttggagtcagcgagttagctgctgtttaatattgcttttcttttattctttcttttttaggtataaatattagagtaccagaaagaaccaaaaccaaagtctggctgtaaactttgtggaaggacttactgtcttgaaagtactaaaaatcccatattgccacattatggtagtgcatttatatgtaatgcgtagacatgcagaaagtgtatgcctgctccattggttggctggtgacaattaggtgacttaattctatgtatgttgaggatttgctaatgacttcctcagaggcagtgagcctgtgggtggctttccccaaagaggcattctccatcctaagaatcttgttgtaattattccttatactatgctatctatatagcctttttcctttcttgactatagctttttggtgaaactcagtgtcattcattggaaaatagcatgatggtttcttattttgtgaactgccattttcagcaagtgggagactacagcttacttcagataaattagaattgcgctaggatagagacaccaggatgagtctctctgactcaaatttcagatgtctcattatttccctttctagcaacttttgtttgttctcttggacaactttggaaagtaatcatgggactgaatggagcttaaaatatgttaccagtcctatcatgactaaatactcttcattgtggagaggagttttttcatttttactttatttttgtcatctattataatgtaagtaggaagggataagaagaattcaaactccaacatctgggagagcttgtttcagtagccagccgggcagccggaaagctggcctcatacaggtgagatgtgttatgggaataagggccttgtgcacttaatgaaccctgcctgcctgtcagcctggtttttcatgtaccattgttgttcaaataagaaaaagagagtgttcacagcctgtggtgagattagagtaatgaaaatgaagtgttaatctgttgataggaagcacatcccatatcctgcatcccgggccacattcatgcgtgtataatatattccaggttttctcatgaccagaaaagcttgggtgttcattatattgaaaacatccttttagtaaaagtgagaagttggttgttttaacttgtgtaaacagttattttaaataatttcttaataaaccaactgctgcttaccttctgagtattctgataatcactgttcctgtatgtgccagcagtcctgtacttttgatcttttaaattttttttacaactgcagaatgccgaaaatgagcttcaatataagcctactttgagatactcttttctcaaagtaggcttaatagagtgattaatagaaggagttaagtgacagtaatacttttctctccataaaacacagattaactaaaacatccattatctcacactttatttttcatcttaaaacaattaagtagaaacaaaaatttgtgaattgtgagtcttccagaactgctttacatatttgcagtcagctgccatgatgtgaacctgaggagaccagcttaaagctttggtcatcacatcatggtagggaattgtgtatttcataaaattctctttctaagatggtataaaaggcaaattaacatgaatgtaatgaagtatatactttccttagaatgtttgttttaatttttgttttttaaatgattttactcagtaattagttgagaaatttccattttttttccctaaagctatatacttaaaaaagaaagaaagtaagtttagtcttggattacaacaaggcattttaaagaaagtaatgtgaacactggttcagtgccctttatatgcaggtcatcctataagatcatatctttcagatgcatcgtaagaaatggtttgaagaaaagtgtgaaaggggtgcggagagataaattaacaactgagttccaggtgtctatttctaattgctcacatttcaatcataatggaaattaaggaaaaatgtttcccataagaaatacactgtcattcaggcctacctaagactgcctttatggagttcatgtttacggtattttctttttttctattcacctaggagttaaggaatgctacagtatgatcattatgattttgtgaactgtttacttaaagttgtgcaagttgctaagaatcaagagaatttggggattaaagtccgattgtgaagtaaatttggcatatgttcagggattacattctttaggtaaaaatggaagaaaaatgcttcctttcggaaggaaacaccttaaaaactaatctttcaagcatgtggtgcaatgatgaaacataatgtaaaaacactatagtatagttgatccaaattagttggcatatgactggtcatagcctacgtactacagtttgcatgatacgtaagcatttctgtactgtagtaatacgtcagagatagcctgtttttaatatagttggatgaaatgagaaggccgttgcttccctctgctaaatagggtatttttaattggtttttaaaatccattaataggtagaaatgctgtgtcgttgtgattgattgggaataatgaaatgtaaaagatattctccttgcaattgctttcatgtaaaaaaaaagtagatataaagaagtgcatggtgactgtgtcatagacatctgcttttaggtaataatcatttgtaaagaaatatgccatgactttttgggtcatttgaacccataataatgtctatttaatgtaagtataaatgtcagatggtggcatacatgtggagtcagtaaagatgaatatttgctgtgataatagtcatgcatcttaaatgttgacttttaaaatataccttgaagacatatcctattttcatattacagtacattttcacttaagtacatgatagctctagaaaggaagtgtggaagtgttaacatgtgaaggaacaaaatctgagtaatgctttgacatgagcatctattttgggcttcagagaaataggtggctgattgaaaaccaatgtaaagattgttgaaccactctgtaaggctgggtcatcagttctggatttactattttaaaaaacatttaattatgaaaatgagtttcctttggtttgcacgaatgtttcattgaaatgaaacttgcttcccattgtcttatattctgtaaacttgtgaaatatgtatttttaaatctctgttctgagaacaccctcttctttttttcccagaaactctagagtagtatgacattttaaggagtagtagttgtctaaaagggccatgtggaggtaacaaaaattaaaacaagtagagtgagtctagtgggaactgtggtggaccagaaagctcatgtctcaaccacagtgaggtagctgctccttggttccagccgattgttaccaggtgggaatgcacgcccagtttgccagatccactgctgctgctttataatgatgagccaaaaatccagatttttatgtgaaatctcctgattttgaaatcttggcaacctattcaaatattttaaaaactgtgtggtctaaacaaaactcatctgcaggctacattcagccctctggctgccagatagaaacctctgttttagataatattttaatggatgaagataatagtttcattgcatgtgatcattcatcttgggaattccccactgggatcaaccaaattcttcattttttcccctgtgattagaaaaaaagtttagtaaatatatttctggtgctgatagttttgatgtatagcttttctccttatgacccacatttaaagaaaaatcacctgtgtgggcaaaacaaaaaaatagtcaaataatttaaataaaggtagaagcataaggattttaaaataataaaagatttctgaattctgaaaataatcccatgatttgtgtaagtaattgatgtagatgaaaagccgaattcaactataaaaagcttttcgtctcaccttaaagcggtagattcttggccctgaatctttgtgggattgctataatttaccaagcaattgattatgatgtcacaaggaggagatggaccacaagggggaaaacttccccctactaattcatgcaaggccaatattttatacctgcttcaagaaaacattatttatattgtataagatgaggtttaaaatgcctgtctatattttttgaagggtctctttaaaagaaattatctattcataattgaaattctccaggcaaatcagttatcagcattttcaacagaacaggtaattaattggtttgaatttcaaattgaaggtcatcctgttattgattttcgtgggaaaaggaaacaagaacatcctgttaaaatgatctgcaaatggggcctaggtatatctaggctctttctagggtcttgtttaacagcatcactgaacagtgtcagaaaccaatcagaagggagccatttgtgttttaaacataacaagttgttggtttgcttccaaaacttcagagaagaactcaactggagaaaagaccagagattaacagtttgtgttagagtaagtcagatatttcaaatcaagtgctggtgcagcttgtaaggaaacatctataaatgtgtcagaatgatgctggtatgccatgttcaagaagttcagcatcaacacagctgtgacttaacgctttcagaaacctttcaactgggaattagataaagtatctttaatataaggggagggaagcactgaagtaaaagaggtagcgaataatggaggataaaagaatatacccctttagatgctgttaatttttataaaataacatttgtgctttgtgtttgctagatagttttattgttacatatgctaggctatttcaaagcattcatttctctcctctgccgtgtttaaactttttgagaatggtgtaatgtaaaggtaacacagacgaagtgggtggcagacattttgcctttctacagtaaaccgaaattagtatcattttggtggttgaggggagacaaggtgtggttctgtggcccaggctggagcacagtggtgagatctgggctcatggccagcatccacctctcccgcccaggcgcaagcagtcctcttacctcagtctctggagtacctggaatatagatacacgccaccatgcctaggtgatttttgtattttttgtagagatagggttttgccatattgcccaggctgggcttgaactcctgagctcaagcgatctgcccacctcagcctcccaaagtgctgggattagaagcatgagggcaccacgcccagccaaaattgagtaagtattttaattttagctgcactaactaggttggaaacttaatgcagcttcttatggttcaaagtaaaattcttaataaaaaaaaagggcgggggaaagccttccattctaaataccctggagctgttagtgcagttatttctaagttgacatacttttgtataggcatgacagtggcaccaaccatctacattaagccttaacattccacagagccatttcaagtttattatgagcttcaaagcctgcacatccctaagagaatatcaagtttaagcatgtcactttgccatagtcacagttaactttcttaaaaaaaaaaaaaaaaaaaaaaagtgccttttcctaggctggttttctacaggttatccttgaaaaatttcccagttcagtacagtcatttttcttacccgttgtttctgcccccttgagttctgtagatttatcctgttggtgatggttggaaactacctccaaataaaagtagtattggtcacaatttgttgaaaggtctatgactatgtaagtatccctttgcagctttattcctagggctcaagacattgatcccattttacccatttccatttgggtttccattgcagtccttaaaaaaaagtgtagctggggagaaaaggaacatgtaaaactgtaaaattgctaatgctgtcctagtacatgacaatttcccaccatggaatgctccatggggaggacgatgggcctgctcagcctgatcttacggtacactgcttctcttcttagggaaaggaattccccatttcctgaatgtgaaacgcctacccttttggagcctcctagtctttagttcctacctcagttaataaaccatccctgtctatgccttgcatctcagagatggaatttgacggactagtcagcattgcaaaggtcaccctaaagctattggcagaatacactgccctttgttgctcagtgatgataatgctactgtagcagttaactggatgtattagactgagctacttttccagaataccaaattatctatttatttcttttaaacacctgataaaatgcccatttacaagctgtctcaagtgtattttcaaaagggatcttaatgatagtgaaatatcagtgctttggcctcagaagagataatctgtgcagtgtgtgtgtccgttgtgttgttttgcttccacgaaaatacttctaaaattatactcatcttttagtgtttcagttgtctgaaactaatcatgttccaacaagtttgaaaattcaaggtgttaaaaaacagttttatttacattttgtcttctgttagtgcaataatactctaagatgttatgaattgctttattttggaaaaaatcttataaagcttcatttccattcccattatttcccacaaatataaaaatgtggaaatagcatttttggctttaggttataactttacacatagtgtaaaagtggatgtcaccatctttttatatctttaaatctactcacaatttacttactgaaattatattcagtatttattactgcttaaattatattcagaattatagaagaacaattaatgatcatgctacttgaagcgggggagctatacttgacatagttttgtgttttgcgtgtgtaaactgattttgtgacaccacagtgcagtcttgatataattttttgtacacaggtaacatttttgtcttggttctcacctaaataaaactgagtaatgatccaaagtgctaaggtatttgtgactttcactaattattttcacttatccatgtattttgtactaattactttcctaaatgatttgccacatgctcttctatcctgtagttctgttttgtcctaatcagattgggtgagcgattagggatttaaaattactacttctttggtctcaaaacgagtaagtgaagactcagagaaatacctttaatttgccttttagtatttttgaataaagcagactctgtcctgccttcctttcatgcatgtattcattgtttcttactgagtgagacaagcacatttaaagtagaatatattccttctctccagaataatagaatgaaatcagtgatcaagtaatttttcatttcagtaattcaacaatcaatggaaacaaaacaaaatgagttaggaaagaatagtttgcattaagctcagacatggaataatatttgaaaacaaagtatcactatagttttgtgctgtaggttcttcctgacctaagtgattgttgaaaggactttctctagtttagaggtatgtttatcttcgaacaataatcacttcatgctgttctttttttcctagttgacccattctccagacctttcaaaaactttttaagtggatgtaaactccgttttaattagagcagtgcagtctaatactgcaactagcgaggaatggaagaaacgtgctggaagttaatacaacccaaatcaaccacagccagataattcccctgatctttgtaacaaccgcccccccttccccacctccacaattaagtgaccctgttgttctgtagtttcaacgagacatttaaggttcatttaaaaaaatgatcatcctttacaggattctttgctcttgcgtttctctttctttcttccccttgccacacagctgtcactggtataggagaaagactggggggaggggaggaggaggaagccctgctcaaatcgtgtcacgtagcactaattcatctgctctcattagagggagcgagggacagcagtgatggccaagagctgcactctacacatgacacgcgaacagtttggggaatagaaaattgctttctcaggaagcccagccaattaaggacttgaccatattgaatgtcaagtgttaatttaggtttttcttcattttcccagtagtaatgtgggtcctgtgatgagcaaatacatgtcaagtaaaagttgattgcatgaaggacctgggtattatatgtcactgacaagtcacaaatgtactgaagtcttttaaccccttaggtgagttgggagggggaggggagaatgggattaatggtaccataatgataagaatagatagtttatgtgggggtggcttggatgggacagacaggaatggtaattcatgcaaaaactggggatagaacaaatcctactctgagggcataaatagagacccttgaaaagcatacatgcatatatataattcccactgcaaacacactgcccagaatatatgttcggtctcctaagattttatgaaaagggaaaatagtgtactctgtggtcatgaaccaggaaattccttattaattatctcatttgaaagaaagaaaacattcattaaataattacactgttttggatattttagccctttggctcaatgccactgtaatatttctggctatttacttataatttcaatctctaatatttattttcaatggactctgtgtgatacatgtcataggaaagatgcaaagcataagactgaaagaatgtttgttttctgtcttgagtatctctgtaaggtgttgtttaaccaatagaaactggtggaaggtccatcattgtcattcatttctttttgtgcccaggtgtaggaggggaagagattcaagcttcagcaagtgaagtaactttttttttttttaaatgttgaacgttgcccatcatgtttagcatctcatttccattcatcagcattcatttacatatgaatgtcttgaaaataagagaatgtctgtttctgttgcagttgtacatgtagcaaataagaatgcctccagtttagaatactgtgtgtagtctgggcaatcttagaagttattcgtgattgggccttgtttttcctttatacctataaccacttttccccttcatatctttgaagacataatcttaattaaaacactttcttgaaacctactctcttctatttattccaaaattttaacacacttgcctttgtatgttgacaatgcttaaactttgaaaatttaagtctgatcatactttaattttggcaacaaaacttactaacgtagtctttccctgtctctcccacaggttagaaactgtgcaatcattatattaaaagttaactaaattttattaaggaataattaggaaacaattccaagaatttgatgtttaataaaataggtttttcttgagaaagaaatagtccctctaatgaggctcctgaatgctgggctggcatctgagttctttaacatctctcctccatgtctcaaaactaaccaaacaaaattcgcttaactctctcttcccttcctattttgataagctctgtggaactgtggtggcattgcaagtgtactgtttaattaaaatccagttgtcagcaggctctcttccactgggtgtgctgagagacttaagtaagtttccataaagtaaattctgacgatggcagcgtgggttgctgattcaagttattccttctcttctgtgtcacttttgacggatggtacctaatgcaatcaaccacaggccgagaaagccttttctttggttgctttagtaactggaccaggagttcccctccccacttcatctccccttcagtggcttgctcactccttgctgccacccccaccaacacttcagcccaaataggaaagcggaaagaacagcagaactacctaggactggctgacaggctttccctaaacctccatttcccagcggtgaagccgaagctgcctccctttgcgtgcgtttttgataaatttaagaagtcaaatcgctgacacagatagataatccaagtgtatagggtgaagcgttataaattaacacattattccctcttaatgtgaaatacttgagaatgcattttctgagtcccctgacatctacccagtgagggctcacattgtgcttttctagtggcattgatttgttaaagcgctgaatcagcatctcaggccagctgcctgatccactgttttgttgtggggctccagctcctcctctctgccagcaatcccttttttccttcggtcttccttttctttttctctccctttccctactgactccttctctgcttttttccattttgctcctccccatctcattcttatttctttttctctctcaccccgcccttcctgtggcttgcttttgtctcaatctggttttcctcccacaccatctctttgcttttccttccttctctcttttgtccatacacatcttgtcctttctcatctctgagtgagttttccctcactcagggttggtgtctgttaactgcctttgcttgcatgtgcatgttgtatgtgtgtgttgaggagggggttgatttagccaatctctcgactccaaatgaatccctgcagagcagaataaattaacgtatgcctgtttgcacatgcatgtcctgtttttaatagaagttcatgagaaaactttcacctattttgctttctagaaattaaaacgtagcttacagaactttaaaactcttatttctaaatgccatttaacacagtaaagttttcttttggctcaaggaaaatggaaatcacggctggttatcacagatttgatctactcacattgtacccaccaaaataaattaacatttctacaaaactctgggcacctttttgaatttcagtgaacttactgatacgacattttttcttcagcaggttctgtattgttctgattccacttatttgtactggtacaatttcatagaaaatagttttcatcgtggtatttgtagcatgctctgatttcctaatatgtgatgcatcgctataccatagtagtgaatacttagattataaaattactttggcccggcgtggtggctcacacctgtaatcctagcactttgggaggctaaggtgggcagagcacctgaggtcagggattccagactagcctggccaacatagtgaaaccgtgtctctcctaaaaatgtaaaaattagccgggtgtggtagcacatgcttgtagtcccagctactcaggaggctgaggcaggagaattgcttgaacctgggaggtggaggttgcagtgaactgaaaccgtgccactgcactccagcccgggcaacagagtgagactccatctcaaaaataataataatagtaataattacttggcaacttgtttagaactaaaatgagattgcttatccttcttttagtgatgtatcccagagttccagaggtcttcagaggagatatattaccatggagagggttacatgtactgcaggtgcaacttcacagacctcttttcataggccccggttcatcctttgaatattggtccaagatactttggtgtcactgtgttgattaacttgatataagaagaaaagtgtatctgtttggactaaaatagaaattaacctctgtaattttaatctcacggcatcacttgattcttccttcaattttactgggttttactctagtaacttcacactagtaacatcaaaattggaatttgaatatgcacattgataataaatcagattacttgaaaaaaatcaaatgtctattgctgttgtttttttttggcgggggggcggagtcttgctctgttgcccaggctggagtgcagtggcgcgatctcagctcactgcaagctccgcctcccggattcacaccattctcctgcctcagcctcccgattagctgggactacaggcgcccaccatcacgcccggctaattttttgtatttttagtagagacggggtttcaccgtgttagccaggatggtctcgatctcctgacctcgtgatccgcccgtctcggcctcccaaagtgctgggattacaggcgtgagcctccgcgcccagccttcttgctgtattttatatagattaaactgacaatttgatttcagcatttgcaatttgaaatggaagtgtttcacataggttttggtaacctttgcttctgagttggattgattctcccctccccccagtcaagtataattccttttttttaaaaattaattgctgtcctctcatgaattagcatggcttggctaaggtgaagggattagaatgacttttcaaggcatgataatgtctgtttaaaggaaagaaaaagaaaaaagtcttttaactagggcttaagactaattccagctactaaggagacaaaaattactctaaagaagacaatttggttttattttatatgtgcatgttaacctgctttgagatcatcattttgtattttagggtattctcttagatgaagtaagatgttcttcatttgttactgaaaggggacatggcctcactccaggagattaaagctggaacaccttctgccttctgtagggataatcacagctcacctggctgtagctcaaggtcagggcaaaaagaggggactttgtgctttttagaattgcctatgactacagtagagaagaggaataataaaacaattggacaagattgaaagtgaatgtgcatcatatgaagatagttaataagatgaatgatcagaaaaagacaatctggaagacatccttcagtggtaggagaatcagtggtagaagaagaaaggggtattttggggtgcaaaactatgacctctgttaacttgcaaaaattagtactgttgtgattggttataaagggctacatgagaacaattttaaaattataaaaacatttgtaaacatttagtatgattttaatttttcatttggtatacatactttttaaaatagttgcttgtcagttatgttgcttggaaggcagaactctctgcacaagcaataagtcagtaaatccagttttttgatctaatattgttgcttgtttgttttgtaataatagcatgtaaataaaaatggttaagtgtaggtgttttaggattcaatccctttgaatttttctctcaacttctctggagaaataggaattgtttctgggtgttttgtaaatctaaattgaatgtcacttaaatgtgaaagaactggcacctttgataagtagtccccatactgaatcattttgtcattaataataacataattatcaatgcaaatgtaaagtttgttttttaaaaagtccaaaacaaacaaaggagggaaaaaaaaacccaagccacactatcatacaactcgaggaaaaagcatccctacatttaaacagaagactttcaatagtagcagtaataataagaaagaacctttggcgtctgcccaagagcctgttgagagggagcagcaaatggcctgcgcagtgtgtggctctgcagaaattccagggtgacacatgcctcacaagctggtcacaatgcaaggggtcaggggtcatgttcaagagcagggtgttgctggataaggctgaggaagcagaggtggcccctctgtgctcagtgtgtgggtctgtgtactcctttcccgtcaaagctggcccagcgcggccaaaaaagcggttccttggcagggtttaatggcaggatgatgtagtctgttgtgactagtgcattcctttcaggttaaactagggaaatggcattgtgttaaaattccaagtcgcatgaatgttttattgccacagtgcatttagccctccaggggagtgtgtgtggcggccggtgggggtgggggtgggggtgacttagagactcaggaactatcagaagaacacttcccttggaaaattttacccactagcatgaagctgatttgctgtgatggtcacttagaagggtttcgctttttcctaaactgtggctgtttaaagtcttggagtctggacaattaacagctgaagaaaatatgacaagacacacgcaaagaggttgggagatagagaggaggagtgcgccagaaaggagctgagctgccttcttgtgtaaactgcctgagagcgggccccctcccctggcctccgtccctgtccccccttccccaaggctgtgttctgctgtctgcccgaaggccaggactgatctgttaaccttgcaccactggctgggaggccgctgcagctcatggtactgtatgttaccattactactccctcattctttttcactggcttttttttttttttttaaaaaaaaaaaccatttctctgtaataacggtttatattagtcagagggatacaattttggaatgcagaagatccgagtttaaaacaaaacaaactttagaatggtactttttttttttttttcctttttggcatttagaagggctaaatccaaccatgctaattcaattgcagccaaaggttttcagtgtgatttaaaatcaggagttctggaaatggagcagttgaaagatgcagtcatttgggctgtggatcttataaagggactttgttgtgaaaccacacgagcatcttcaggtttttaggatattttcagtctttgcatttgtctcagttatatccattttgcagattgcccccaacccctatccttccttagggaaaactctagccgtctcattcactgttggagttgttttaggcttacagttactgagggtgtgtatgatttgacttcagttgtaatcgtgtgcattacatataacatttgaactgactcaagttaatttataacagattaaagtgtggatgtgtggaacagctttctgataatgcagtgtgcctttataaaatattcatgtgtctgattttttcccccaatgtataggagaaatatgtattatcctaagatgacctaagaaaggatatattaataatagtttgaattttacttttggactgcatttctcttcaatttcaaaccttaattctttctttgttttcatgttcctgttcagatgttatttttcttttccttaataatacatatatacttgtatgtgtgtgtgagtgtgtgcacattttaataactgccaaatagttataagaaaaaacttggagagctgctaagttacttttccattgatacattatcagtcagaaagtcatgtaacaaaaattcaactcaagaatatagcacagaaaagtaaactatgagtggacccgtgtgccctatttatagagttttaagtacatgttatatatatcttataaaacaatgattttgtcaagatagacccctgagtttaatctgactaatggtgtttgtatgatggcttgttcttcttaaacatatatattgacattatttataggaagtcttacaccaataagcgatcagctccataggaaaatcaagctgtgtttatgggctgggcacttcaaattttaggtgaattcattagatatttttttcttatattctagagaatacccacttcaataattatttctttttgttctatttggtctagtaacatgatgatagtttttttagtgatttgttttttagttgtacattttaaaatgtgatttttccggagaatattgctctgtgctggatttttatttcttttacttaacagccaattttaaagttaattattttatttaaatactagaaaaagtagttaatgttgccaaatttaggagaaaaatctgtcaattaacatttagattatctgaagttatatttcttttcctagtgatagaagcactttttttaaactgtgaaaaggatgttgtagttgtgttcagccctttccaatttgatttattaaaagtttcctttcataatccaagaggggaagagtggaattactccagtatcacatctctctaataagaaaatttcagctgatttaggaatcttctccgcataaaagtaaaattttcttaaaaaatatcatcacttgttcttttagtgttttcctgttcccattgtgccaggcacacttgtttggctttggaaacttcgtggaatagtgaaaaaatgggtgttgtttcagattctaatgctgctacatgttagctttgtgactttggataagtgactttatccctgacctttattttctttgcttttaaaatggggaaaaggacatttagcttacagattgtcaggaaaatgaaatgagacaacacacttgaagttccagtacatagtagatacttaataaaccttaggtcatcctcctttgacctgctctgtggcttattctccagtttttatcccttgggaagcttgaatttttggaaatagtagtgtaggatggtaggggaataagtttaaataaaatgttttaggttcttcatttatctctaggaaaggcgatattaggccatcagcagatgtcttttttttttttttttttaagtaaagaaactctggcgttatttattagtctacatttttaccactctgcaaaattttcattaggttgatctttgtggatgtcagagtgatgctatcatttctgtgttaccagttttggtacaggtagtttacaagtaaagttggccgattctgttggatcctgtttacttttgtataatcttttctaatcatttgcttgaattaaagcttcctgccttatagtcattagcatttgatagtggatcttgaaacttgattttgcaagttagactccagcgtctgtccctggttttgtgaaaatctacttataatcatggaactaagaccacactaaagcttcgagtgtttacacctctgtagaattaaacaaaacagcagcagtcaacatacatgtatctgggcaatactttatcttcatttagaatcttgcagaatgcctaaagggtagttaaggacttaggaactatttgttgagcaaaataatgtgcttctttttattgttttttagcccaggattatgttttcataaaaaataattgtgttcccatgtgaagtacattaatattattgtggttggtctttttttttttttttttttggagagtctcgttctgtcacccaggctggagtgcaatggcatgatcttggctcactgcagcctccgcctcccgggttcaagtgattctcctgcctcagcctgctgagtagcttggattacaggtgcctgccaccacgcctggctaatttttgtattttcagtagagacggggtttcaccttgttggccaggctagtcttgaactcctggcctaaaacgatctgcccccctcagccttccaaagtgctgggattacaggtgtgagccaccacgcctgcctgtagatggtctttatttagtattgctattttgcttaacatctaacttcttttagcctgccaaagtttgaacatactgcatcttaagatctaaaataaatatttgacttagtgtttactttggcttgttagtaagcataaaaaaatgaaaattgttaactaataactttattgctaccttttagcacacatagtgtgctagggatgctagtcatgatatcttatttatgcttacaaaagcattcatggaaggtacccatattttcattttacagatgaagaaatcaaggcctaacatgtgtaatccagcaaagttgattccaaatcccttgctttcccccttgctgcattcttcatatatcatttaagctagctatttaaaaagaaaaaagaaagttagttgtagaaaccactggttttatttcctttcaaattaaattttatgaggaagtcagtatgtagaactgataaaaatcagagttgttctagatgaaaagagatagagccacagtcccatcttttaagcctctcctagggatccctggaatacttgatgagaaagccttagcctaatacctccacaccccagaaaatggggcctagtgcaactcttcagtttccccatctgggacttgaaggttttgtttatcttgtgcttggcgatgttattatgtggaattcacaggaaaagctaatcagtataattttatttattatttatttatttattcttgagacagagtctggctagagtgcaggggcccgatctcaggttcaagaaagtctcatgtctcagcctcccaaataaccgcgattacaggtgtgtgccaccacgctcagttaatttttttcttttgtatttttagcagggatggggtttcaccatgttagccaggctggtttcgaactctggacttcaggtgatccatctgcatcagcctcccaaagggctgggattacaggcatgagccactgcacctgactgctaatcagtataattttaaaagcttatgaaagactgtggggtaaataccaccgcaaaaaaaattacaagccaggttgctggcacgcacctatagtcccagctgcttgggaggctgagtcaggaggattgcttgagccgaggagttttgagtccagcttgcgcagcacagacagggtgttgctttgttgcttgggatggagtgcagtggtgtgatcatagctcactgcagcctccaattcctgggctcacgtgatcctcagcctccagaatagctgggactatagttgtgctacaccaagcctggctaattttttgtagatatggggtcttgctatcaagacctcaagcagtcctcctccctcggcttcccaaagcgctgggattataggcatgagcaaccatgtttggcctcattgtaaatgttaattttcagggtataaattttgtttcatccatagcaatgaagtaattttactatggaacgagtctgaaaaaactaagtcacagttttatgtctaactgaagtctgtgtctacagactctacttcattttgaaggttaaagtttgggtgctgtatatcacattatagcatatctattaaagacatatacatatcatacaggcatatatgtgtaaacataaggatggagaagataaagtggatcaacttaactgggaaaataatgtcaaaatcactattttaaataaattgcttgtaaaacaaattaactgccatgataattctgtaatatctttataaaccagaaattacaggttttctcaccagataaatttacattgggaatttatgtagctctttattagaaatatgtctctttcatgaatatagtgagaagagtccagactttttagctagatttacctgcatttgaactgatctctttcctatgtgactttgtaaaagttatataacctctttgaatcttagttgcttcatttataaaatggggcttagaagtaaatgatgcctgtgaattctggcacagagagggttagttagaccaatttcttcttctgtctgttactattgtagattgctagtcttatgcagtttgcacttggtatctgtttatcaacagtgccacagtgttctttatacttgcatcatgtacatacttggccttttcaattactagtttaaaaaatacttgtgtcactcttgcagaagtcttacttttgcagaagaaaatgagggtggagagaaatctcttctttcttactcttcactgagaatcagtcactgagcagcataattctaaaatcttatgtggcttttgggtactttatgaacctttttatggtaacccagaagcaaggcactgattgaattaatacatttccatcaagggactattctgttggcctgtcttcctcctcctaacccatgcatgcttctataagggacttttttgttgcattatttaggttgccacatatagtggggatgacagtttgtagatgtgcaggttactggtaagccttatagcctttctgtttttaaaacaaagggaaaggacaaaacaaaaacaaaaacaaaaacagaacagcaacaacaaaatcactacccaaaccaaaagtaacttaaaaataccatcttagctttctggaaaacccagtgctttataaaatgtagaatctaaagtttgcatactgatattaatttttaatagttttaaaacttttaaatacaacttctgtacaaaaggatatgtgttcatagggcagatctgattaagaaaacctcaaagagagaaaactgcctgaagggctatcaccaaggaactgttaatgtatttttagtcgtctttcttcatttacaagtacctaccaatgtatgaataggtggtagtttcataaagggatgatgttacatgtatatgtgacttttaaaaaatgcattgttatcctaagtatctttccatgtccgtaaatataggtattcatcatggcttttttttttgagatggagttttgctcttgttgcccaggctggagtgcggtggcgccatcttggctcaccgcaacctctgtttccccgggttcaagcgattctcctgcctcagcctcccgagtatctgggattacaggcatgcgccaccacgcccagctaatttttttgtacttttagtagagatggggtttctccatgttggtcaggctgatctctaactcctgacctcaggtgatcctcccgcctcagcttcccaaagtgctgggattacaggcgtgagccaccgcgcccggccctcatcatgacttttaatggattcttagcttgccattgtatcatagtttatttaatgagttcttggtttgtggattttttttttttaataaacagtagtgcttaaatatgaacatccttgcttgcccttgtatgcttatttcctaaaggtgaagacagatgtgatactgctagggaaggcagcataattttgcacagcttaagagagagattggcaaatctgttctgtgcagggctagatggtaaataggtagatgtatggtttctgtagcaattattgaagtttttgtaggaccaagcccctgtgtatgtaaaggaataggcagggctctatttcaataaaactttatttacaaaagtaggcagcaggatagcatttggcccacaggcttgtttgcctaccctggacttgaaactaagtagaaactaatttgggatgaaaatttatccctagtttgctgtaaactgcttttacagtttcttagaaatgtgttcctatctcagggcaatgtaatgggctgatgactgactttctttccaggtacgtggcaatcaatacttaattttaaagaacttattaaaggagcttctcataccagctcctactcctgaagcctagtaaattttaaactaagaggttatatataccagtatatatttttatcattctatactttttttttttttttggaaatcgagtctcacttgttgcttaggctggagtgcagtggcaatctcggctcactgccacctccatctcccaggtttaagcaattcttgtgcctcttagcctcccaactagctgggattacaggcatgtgccaccatacccagccttttaaaatattttagtagagatggggttttgctatgttggccaggctggtcttgatctcctggcctcaagcagtccacctgcctcagcctcccaaagtgctagaattacaggcgtgagccaccgtgccctgccacatcgtatactttagatttcagcatatgttgacaacttgttgggcaaggaacgacctctttaattaattaattaattttatttttgtatattttgaggtggagtctcgctctgtcacctaggttggagttcagtggcgcaatctcggctcactacctggttcaagcgattctcctgcctcagcctcctgagtagctgggactacgggcacgtgccaccacgcccagctaatttttgtagtgtagtagagacagggtttcaccatattagctaggctggtctcgaaatcctgacctcgtgatccacccgcctcagcctcccaaagtgctgggattacaggcatgagccaccgtgcacggcacactctttaatttatattgcagggcagatgggtatttccccctttctagaaggttgcttagttggagtcatgttctagagatattcagaagtaagctgaaaggaaagtccaataagaggagaagaatcatttcagcagaaatataccacagatcaacagggtgacattgagttagttactgaaccttaataggctaaattatacttgaaaaaatgctctgtgcataaataataacctttttgcatcttgagtttctataaaacaggaattattggcctctacttgccttacgggtatttgttgaggatctgctggaataatgaaatagttaaaatcactctatttgtaacattgtgtcactggtgcccttatgaattttaagatatttatttattattcagtatgtatttgttgactatctgctatgtgtaaagcagtatggcaagtgctattgggaaatacaaagagaaataagttagttcttgatcctaaggagagaaaaacatgtttttaaggttcaaggtcatgtggtgcttagagccctaaggaacatagagcacttgggacgatgagatccctttcatccaaaggtatcaggaaatttcatggaagaagtggcatcaggaaatagggacattttcaaagggagaatacaggcgagggtattccaaaaagagcagcatgagaactatttcaggttaggaaagtccaaatcagtatgcaagagacataaaatattctaattagagtgtctatcaagcatttttcatgaagaaggaggagaagataaagctggaaaggcaggttagagctagattgtagagggcctggaaagaactgtaattggtaattggtggggagctataaacatgatctaggagaatgtgttcgacaattggaggggtggtgtatagcactagttggcaagtatggaatgataaagtcaggattattgctaaagggttattgcagaggtctgagcatgtacttgttagaattattctggaaagtgtgtgggggacagctgaggggattgaaagggcagaatggacaggctatcagaactgactgggttcaggaaataaggagaagccttttaataatgatgtatggttctgagtctttgttaatgggcttatggtaataacattgaaaaatatagaaaaatccagggaaagctgtagtaaagaaaggagaccagtgaacctatttgcttgtttagctcgagatgttaactggacacttagaaaaatctagtgagagtttgaaaatgcaggactgaaattcacatgagaggtaaggattagggatttgggagccctgttcacacagaggtacgtgacagatgagacttgagaagagcttcacgtcacttaacgagaatgcgtgtaagagagaaaatgcggccacatgatgtggctcatgcctgtaatcccagtactttgggaggccgcagcaggaggatcacttgaggccaggagttcaagaccagcctgggtaacttagcaagacccccatttttatcaaaaaaaaaaaaaaaaaagaaagaaaaagaaaaaaatttagctaaaaagaatcacttctcagctaaattgcagggcacgtgggtattttcccccttctagaaggttgctttagttggagtcatgttctagagatattcagaagtaaactgaaaggaaagtctaggagtttaaggttgcagcgagtcacaaatgcacatcactgcatcccagtctgggtgacagagcaagaccctgtctcaaaaataaaaataaagaaaaagaaaatggtattattttaagtattacttaccattgggtaagtcaattacgtaagtagctctgtctttttgtgaggcaactaataccaaaagaaaagcaaaaaagaaactctcatgtattttaccatttataaagcattctgttgtccactaagcttctcttcttagcttctaaagctactaggtttcaggggtaaagtatgttcagtttggggaaaaaatattttcataagattcccaaggaaaatataactccctttgactttatcttctctccacttcctgagaaccttagtaacaaagatgttactggtaggacgggtttacattcactttttacctgtctgatacagactactacagcttttcatctcccctagttctcaccccagttgagatccatgcatttgggatgggggtgggggggtatcccttagaaatcaactttgtatgcgtttgcacatttttctctttttagtctggggtcctcagcaggcttggaggggggattgtgtagtatacagtatgacttatgtttgacttgggaaaatttttcctgtatggaacagcaggactgaatctgctttctcatttcctttcttcttttaacattacctatgttcaagctttgcatgcaaagaaaaccgtgttgattcattgatcttcgacatgctacattatgagccttggcagaaggtaaaggctcccctggctcccctgtttagagcagccggaattcctctggtctgttggtaccatctgtggccttccttcaggctcagtcttcatagtaagtctaactcatgtcaaatgggccaaggtgctagtccagagtaatttgcatctctagccaaccactgtgcatttactctagtagtaaatgcctgttgtatttgtctcttaaactgtgtatgctactgaaacttttttttaaaatcataattggtttaatgtaggtggttcaatgagtagtttgtgaagttgaatttttgggaactaatatttgctctttccctttctgatgccacaacatattcttctatcctatttcattcaaattcactattctgcttttttcacataagtttttcaatcaccctttttccctttggtgttgtttagcaagggaggaaaccctttcaatttgttccatttttgtgcctctgatgaagtaagagcaactcagacggatgtattttcttcctaagtaaactcttttctaaaaaaatgccacaccctccccccaaaataaagcattcaatagcttgatggtgattacttgaaggcagtctctttcctcattagaggtaaatacatcttcactcttgattgccgcggaaagataggtagagaagctgagtggagcaaacccaatggctgagttcaagttgacctggatcattttaaagtgcttttcatgtaaatgctacagttaatgtctgtccccacataatttctttctaatgtttgcagcagatgtggagttggccttaccactgctcaagctgcttgctcattttggctttttctcgtaagcttttcctttcctggcttcctttcttttctttacagagtgagatgttgggagataagaattttatgccttggtgtatgctccttcttctttctctccattgttttaagttatatcttttctaaaactaagttatgatctgtagagcttttgtcttatggttcctttttggttttctagtttacatgggctagggagcctcaaactttaatgctcatcagcatcacgtggagggcttgtaaacacaggtgagggactccacctccagtttctgtcacagtgggtctcaggtggggcatgcaaatgagtttcagacatgctctcaggtgatgatcacaataatctttggccaagaagcatgccttgggcactgaccgagactattggtcttgtctgtcagtgtgctgcccacccccagagggttgggttcttcagattttattcatgcacgttctctggaaactctttactttttaataatttataggccaggctgctagcataagagaactcagaaaattaccttatattttaattgtgaaacggttggttgcaggaggggcagatatgctgcttcttgccactctcaccccctcatcccccagtgaagtcttttttttttttttttttttttgagactgtcttactgtgttgcccaggctggagtgcagtggtgagatctcggctcactgcaacctctgcctcccaggttcaagcgattctcctgcctcagcctcccaagtagctgggattacaggtgcccgccaccatgcccagctaatttttgtatttttagtagagacggagtttctccatgtcggccaggctagtgtcgaattcctgacctcaggtaatccacccaccttggccccccaaagtgctggaattacaggcatgagccacgacgcccagcacccagtgaagtctttaacactaagtccctctgagctgacagcgatcttttcggtcattccaaacacagcatcactctaggaagccttctaaaagatgattgagttggcccttggtccctaagtgagaccaagtgactctgtctctttttagtttccccagttgcttataatattcctttgacccttgtggcttgctttcctttcccctatgcggcttccatcgtggtctcaaagttctcagccttcattggattggtatgctgtggtgctgcttttgtgggctgggggcagagtaccatttacagatatactgtgtacctactgaatccttaggtgctttacatgtgtcatctcattcaaccttgccaaccctgcacaataaatataagtatcctcattttacaggtgcaggaaacaaggctcggagatacgtaactgagcaactttacaagatattgcggtagagatttaaacagagatctaattgcaaagctagaactctttcagtattacctgtctttaagatagctggagttgagtgttgaggatagaaagtaagttaacctgggtgtggcatacttgaaattgcatttaatgtcagttgtcagagttgacaatgtatttgcccataagcaacaacctgtggtgttcaatttccaaaataatgtattacaagaatgattgcaaaccaatagaataatagaattctgtacctttttttcttaaatataagaacccgccgggtgcagtggctcacgcctgtaatcccagcactttgggaggccaaggtgggcagatcactttaggtcaggagttcaagaccagcctggccagcatggagaaaccccatctctactaaaagtacaaaaattagccaggcatggtggcaggcacctgtaatcccagctactcgggagaatgaggcaggagaatcacttgaacccgggaggcagaggttgcagtgagctgagattgcgccactgcactccagcctgggtgacagagtgagactccatctttaaaaaaaaaaaaaaaaaatggctgggcacagtggctcatgcctgtaatcccagcactgtgggaggccgaggcgggcatatcatgaggtcaggagatcgagaccatcctggctaacgtggtgaaaccccatctctattaaaaatacaaaaaattagctgggcgtggtggtgggtgcttgtagtcccagctactcgggaggctgaggcagaagaatcgcttgaacccaggaggcacagctttcagtgagccaagatcgcaccactgcgttccagcctgggtgacagaatgagactctgtttcaaaaaaaaaaaaaaaaaaaaaaagaacccatacccatccgtggatctggtacaagtgacttcattctcattttctccaatgctaaaacccaggtaaagcaagaattgcaggaagtacgtgaaatctgtccaatagtaggatgtttttcgagtaaagcactagcgaagtcattgagagaactttgtcttaatttcacttctatccatttttatcaaatgtagagggagaccatagtgataggtctcagttttctcatttagaagtaaaaggagtacaatggaaatttctccccttccttacttgtctgatgtgggaattaataaatattacgtgtaaagccctttgagcactctggaagaaagattctatgtaattttagcattattcgtggtccattaggctcctcagggtgtcaccagggaagagagatttttaccttttatcccatatttcacagtataaaaacaaggtatttctgttgttgtttgtggctgtgaaaaatctcctgtaattgtacctgcagaggttgctcctatcacagagcccagggcactgttctttggcagctcaccccagaggatcagctcctgagggaagagcaagagtgaaccttagtgaaatagctcctggtggctgtgaggacattgtgcctgctccaccccgcaccctggcatccccccacctccgtcaccttctgtgtctttcaacctgttgcataacagaatcacatactgattgactcttttccattttcttttatcttatgctgatcctatagttcattgctctgagatgactccagaggagatctgtgtctccttcaggcactggcatctgtcctatccagttcttctcctataaaatatctcccatccttatcatgttcctattgatacaactctgccttatctgactctataacaatgaatgtatttctggtcattccatccttgaaaatggataagtactgtgttgtatttatttatttgaaacagggtttcactctgtcactcaggctggataataaatactgtgtcgttagtatgtatgtatgtatgtatgtatatatttgagacagggtttcactctgtcacccagcctggagtgcagtggcacactcacggctccttttaactttgaactcttgggcttaagtaatcctcctaggattacaggcacatgtcaccacacccagctaatttttctttcattattacttttctctctgtgttgcccaggctggtctagaactcctggtctcctgccttgacctccctaagtgctaggattacatgtgtgatccaccacatccaatttgactctgttttgatttaccagttgctttctgatcagtgagcagtgggttccttcttcgcccttaggttctatattcttggtccttctgagtcttagtctggggtcccatggtagagaaagtttaggcccagaattttgtctcctagttaaattgtaggctgaaaaatggagatataatttaactgcatactctgccacgtagctcaccttcctgtgtttctgcttttgtattcatttattttgcagcagtgtgtttagcgtgcatcttcatctttacagtgttggataatttgtttatttctttatctgctctttctcacagggactcctggtgagcttattgtcaaatctatttcacttgatggtcttcctgaactctttgtgttatctgagtgatttttcctcttgccgcttggcattgtataaccactgaaattaggctggagtgctattgggtcttccttttggcttggaatccggcagtgcttgtacctagccatgtctctgaggagcactctgatggggctttatttctgtttatctctctccctctttttttttttttaaacttacattgtatatcattcttttccaaggtctttgtcccttcaacactgccagactgaagccaccaaaacacatacacttcagaactgatctgggcttggggccagcttgactgaggagactggagctcacatggaagttagtttgtttatttaggctgtgactttcatagtgtctatcaggcagatgcctacctgcgtgtttaatatttaaaagtaaaatggaaatttcaagtggaccctggctctgcagggggcatccctgactacgagcccttttcatcgtaacatgactcttctctcaagttatcatttctgtgacttttctcttttttcctttgtcccctttctgccacccatttttcacagccattcatcttcaaatattttcaacggtagctcccatttacaacctggagctttttatgtcttcttttcagaagtctggtccctaacattttttttttttttttttttttttgtgatctcagtaaacaaagagtgtgtgtatgtgtgtgtgtgtgtggttatgtgtgtaggaagcctgccatatttcctccctgccccacagaaaatatgttttctggaagcccttttgacaccgaagtgaatgcccactggccctcccttgttgaattctcctgaggggagagagagaggcctttatacttgtcatatcttttgtttctgctgattatacacaaagtaagttgtaaatagctctctcacacaccatgattccttcaaggtatgtatatacaggagagtagatatgtactcagcctccacttgccctggggatttcagagggtccctttcaaggcctctgacctcctgttacagtactaagataatgaaatttacatcagttgtaggcagttattccataattaaacctgtggcataatgtttagaaatattagctgaacagttcaccatttttttttgtttttaagttaaatgattttattacttttaaagcaacatatacaatcatacaaaaagaataaaagttaagtacctataatcttaatcactgtgaacattttggaaaatctttgtagaactttgtactatatagtatgtcaagtatgtcattaaaacaggcactaggtgttagcacagaggaaaagtggataaaacggaattccccaaatcagtttaaaatttatattaaataatggttaggcacaccccatattttattatcctaatttacaatagactaataataaggggttagacaattgatatctgatttttcttcaatcattttttgattgcttgtggctggctaacttctgaggcttctaaatcaaaaggtggaatgagatgtgctaaattacaactaattaggttatcagcttttatctcttttgtatcttccttagtacattttgatgaattcagaaagagatatggtttgcctttccgtgttgaaagatttccctaactgatgacgctgattgtggtggatggggtgagagtgtggtgtatttttagaccatgaaccgttcagtgaactttgtgaaccaattttgatttgaatctcttatccctcattttttagaatatgggagtcaactttcaaagattcttatggatatatttttctgctcagaaatcctagcactctaagtttgaaaatgtacccacttccctactagttcctttttgtgattatgattgttgaaacatactggtagtttgccaccatttcctcccaacttactcacagacctttatgttttctcttagaaacagtgtatttctaagtgtctcaagttgtaattgcatgtaattttagttgtttaactttctccttccctcttgagaatgtttataaagtgcattctgtgactgtgaagataaaaagaactagaaacttagtgtttgtgacgtggtcaaataatcttaaggtaagtagcaatttgttttgtgtatgtgagatcgggtgaggtttacacttaatttgcaatatatggcttactgaatctgccttagttaagtcccatttattgaggttttataataaggttttggggggattcattttgatttggaatattctcaggttaatttttttcttttcccttctattgctccctggggagaattactgttgcagaactcattagtggccttccatatgtcagctgaggggtagaatgagcattatttctatgtgtgacacaacacaaatgcacagtgcccccgctcttctccctgctgcatttctttcttattcctcagttaagaggataaattcccttttttgttacttatgttgtcctagaccaaggagcaggtagcaggtcttgatttcggttagcgcctttttcctttgttgtcttctttgtaatttctttcatatgaaacatcaacaaatacctctagaatggatgccactaaatgtagttattacatttttttttaaaattaaattcttggaaatgtattctcaacctttcttttctttctcatgtcttaagtttgaatccaggttttacaacctaataacatgtgactctgagctagttatttacctactctaagcctcagttttttcgtttgtagactggagatgctcatactccgtaagagtgttgagaggaaaatgagggttaatctacacgtaagattccccacatagtgactcgcgcattggcctgcacgtgtgaaactcttgggtaaagagtggttgtaaacttcaaagacagatgacactctgtccatttcaccttatgagcctagtaaagaagaataaaagacttgaaaagaatgagagaactggacctaaaaatgtttgaagcgttgaccgagtaccttttatttttcttttctttccagtgatattcactagtgaacttgcaaagtggagtatactgaacgttgtttaagtttggacgattgtactgatttttgggtgaaaagaaagagggaagcaccttttaagctagcatgcatggctgaaaactgatgtctgaacaaagcaaattgattagcacagatgatcttaattggagttttaaaaaagtcaaagaaaacaaaacagaggagtgctttgatagggaaagaagacaaaggtgagatgatgcttagttgatgtattgagtttagagacatatagacagatatatgattagtgtgagtagtataagtatggaaataatgaggaacaattagaaatttttaaaaagcagaaaacatgtttaggtggaatctaaaaccttgtttaatcttaaaaaaatctgaaatgaaataagcaagggacagtaggcagtatttagggatgatattgactaattataatagcttagttttaaaaagggatcttagtggctttcagtttagaattttagatatagagaaacattcattaagttttaaccttgtttttttattattaggacagatacataaaacaaggtttttaagcttaaagataacatgtttaaatgagtaactattaataataaatattgataaatagaagtctgcctgtgctagcctacaccaggaacaggaaaaataaatttgaacaaatattttaagaacgtaaaggaacttaggcattgttgaatgtatttttttttaaattcctacataagaaaattaaaggaaagaggaaaagaaaaaatttatgtcaccaatgtgaaacagaaattatctattttagtcttttcccatccctgcatttccttccttctgtctccctcctcctgtccgtggctatttattaggtgcctactgtgtgctacctgctgtgaatacaaggaggaacaaaatttatgttgcttttttcttcttggaatttaccttctggtagttaataaactttgttacatggtattcactatatatttgacatactaagtgtcacatacatgtcaagccatgatgacctgttagagacccgcagttgggatttcctctctctgcctgggtcaagtgtgactgtgtgcagttctcagcagcctccatacacagcatctaacgtggctgtattccctcaggttccattggcatgtactggcagagtgctgggggcagacttctgcccaaacctggaggagccataccacaggctggaagtccaggttagagtcttaactgttttctcagctaggggtggtgtgacagaaacagtggtcctggaaagccatttgggtatatcagcgtcatcaggaaaagacaaccattgagttaggtgtaaagaggaaccagtgtagcgtatgtgcagccataggtccttttcaggatgcgttgtctgtaactgtagatcatttgtctgttcagtcaagacatatatacatactgtagtaagtacatggtctctgaaggttgactacctagagttgatacaagttgctgtgagacctttggcaagtcacttaatttaagtgaaccttagttttctcatctgtaagatggagatttaccacacaaggtgatgatgagaatttaaaggacctgacatatattcagcagttagtgcaggacctggcacataacaggtacccagtaaatattagctttcatcttctaagacttttgggatatatgtgagtaagtcatgcttcctacaatatggtctcccggctcaggagaacagcagccattcaactgagtgctttataagaaaagcaggacttaatgaaatatcttctgtcttcatgcgttggaagatatgtcttgtggtgtaataggagtatattagcaaagtacattttttttttttttggtgaaactgttggattgaaattcagttcgttttgtatggtcttgaggcattagaagtgatttggtgtattgcaaattaaaaatgtaaatgtgacattttggctaaaggcatgcctccatttctatgtacataataatatttaaggaatgtgtgtgccaatgcaaagatgcaggctgaagtttcaacatgggtagcactccctagcatgaggaaactcatacttttttttttaggacctccatttggccttattttctaaattttcaggcttataagatgagcatagtgagctcagttttaaaacgtttttactgatttagaaccacaaatgagaagagagaaccatttaaaaaatggacttctatgcagtgagaatgagggtagaagtggtggtaggaggaggtttcagtttttatggtaccgaagggtatgccatctctagcacacctgctcttggcccagggaagaccacctgagctctgctgtgccccaaactggtactgtctgggtggtgtatgtctgtgatacaacagaaaagcaggtgggacacatgagacacgatcatgtatttcctagttctagaaagctaacagcttgtgtgtgacatgcaaatgcagagtgatggaagactttttgtggagagtagtctgatccttgaccttttttgggtaggacgagtgatgttcttcaaacacatcacctggaatggtctgtcatgggtgattgttggaaatctgtttttaaaccttgaattacagtgaaaagaaaattgggttttgcagatgtgagtgtgtaaaataaaactggaaaaaaaaacctattgagtacattgacatactatgggagaaaatgtagaaaatgttatatttacaggttaaagtaacattctggttgtagatgaaccagattgtggggttgatagttcagaaaggaccttgcaaagaagactaagttcctggacaaagtaatgaaagtgacattattggatattcctcattgtggatcatcattttggtggactgcgtggaaggattgaatctgttaaaagatgatcagctatggagagttagtcaagtagctgggacccacttgaagcatttcttcctctcttctttttcttctgccttcctaaatgtgcttcttctgcacattttagaaatacctagtacatatacatattatgtccaccataataaagatgcttaatatacttttcaccagctatctatttcaggagtattttttagcttagactgctttcattcttgccatgtcatgtgtcctagtcctttttaaattttttcctagagaatgagccatttcttattgttcagcatagctttatactctagggagctcactataggacttgccagtcatctccttttcctgcttgtatcataggctttgccccagggctaggcattatcatcactagaggttttgctgtttggcctcttgattctgagaataaccttccgtacacctcaatttaggagcagcggtttgtttatattctttcttagaaaggatttttgtttagacatacagccctgaaatctggtttacttttatgttttagctgacgtaagttctcatgactggtggagcccctttctgctctttgccttcttccttttaaacctttgccttttattcctaaaatttcagatttcttagcagctttatttttaataatcccaagatcccctactgtggtcaatgaatgtatctttggttttgaatgactgtcaaccttcaagtctgtgcctgatttgacttttgcaaggacttctgctgtggtttgtgttaatattgcttgattcagaaaaataactggaaatcaagattttgattctgtaactttatttactttccccagtggcttttgaagtgggtactccagtttgggaggttaactgatgaacagcagcaaagaatcccactcttatgcaatcatcttctaagaaatggttattctaatttagactctccttaattgctgatattttacttttatcagagaaaagttactttgttagttcagttgtgcctcatcatgtattaagttgttacatttagctcagcacagttcttttcttggttgggaattcaggatgtgaggtttgacttggtatttttcaccactgaagtgcttaaaaaattagagtaaataatgaaccaatatttcagtactagattagacacaatttgctgtgatgttttataaaccacaggctcctttcttatgtgaatgcgtggaggatcacttttttttccagacatactggggtgcaagtgtaaatttccataaaagttaaatgaggtgcttcctgtaattaatgaacaactgtggctgctctctggtctgcattgtaattaaccgtgatcaggcttgtttagtgatgacactgttcctgtaataatttgacaagctactgtgaatttgccaggttattaaacaacctgcagcattcacttctggaatcacggagatgagctcggctgctgctgctagttaaatgcagcataagggtgaaccaaaagctgctcatcgaagtctgtcgatcactatgaacggatttaaattcctatgatgttggagaagttaattaattttgtatagggtgtcttgaaactttttattacatgataaacctactggggcaaagctggtcatgtttatgaactcacaatgaagccagcaaattctctatattttttaacaacagtatgaactaaacaaaatctgaagttctccttaccaccttattaaatgggtataacttatttttaaaaaaaggttgtttccttcacagatacatccacaacatccccccaaataaaagttcactctctcttttttttttctgttccaaatagatgaccttgtgctaaacaaagtggtgttgccggtagagcagtctaagtggaccagtagccttacatccttggtcaccagcgcaccggtcccccaaccccctctttcaggttaagatctgttcaaaacgttactgtctagttactgtggtgtctttcattcagattctgtttattgactaaaccgcaaggattcctgcccaaagtaccaggcggtctatgcttgactgattttgattttctaacatcagccctgcggtttatttgaaaaatgtacatacactgcagctttaacaagtcaagtgactgcatgtttttgaccatggagtagagtatatctgaagatcattaaatttagtgggggaagggaggggtagagaataagtgtagtagtcattgtaccattgcagagtgagtgagtgtgtgtgtgagtttgtgtgtgtgacacatggtttttgtcttttcatcttctccaagagccagaaagtttcctgcagttctctttccagctattgacaaatgattgccagatgtgagatctttgcagtgctctttccctcagcaaacctgcagcgatgggatatttgattctcccttgcccatttcatctcctttccacatctgccagggacacacaagcaatacatccctacatgagagtttaaagtttattcagctcctttttcccctccgataaaatgtttggagacaacagaatgaggtccatatgactctctcctgacttcaccgtatgaaattaattgtttattttacttatctacctctcagtaattgaagtatttcattttagtttcggtccatggaaaatttgacgtaactctgggagtgctaagagtttcctattgtctgcttgctgcaagtatgccaccatctcagcttccctttgagtgcctcaattctgataaaaactagactgttggtttcacaggacttcccagtaaagtaattttaatcaacagctgtcaaaatattaagtgtggagtgtctggtaaaattcagtagtcatttagaatttaaaaagccatctaagagggagaaaattcaacttatttggtttgattggtttactctgtgtttgtgtccattgtcgaaattgatatggatgaggctctagttttaatcacaagtagcttaaaaaagagaaagtacactgagtttcagaggaatctgaagttagcctgtgtaggccacacacgtaatcactaacatgcacagaagccttttgcatctgcttggaatctgtattgatactgattttttttttttctcatctcagtttgaaaatattttccaaaatgcccttatagctcatgttcataccatagggtgggctgacacaggtggcctgtctgttttccttttacactttttggcaaatggaaaggccccttattccctgaataagatcaacgtttttttttttttaaacatttaaaaaataatccataaaatgtctgccacatgttctctagtttatggaaatgtttgccaaattagacttgtggaattggattcttattgtaaaagtattagtgtgtttactatttctgctaccttcttagctacctgtgattatgtgaatttatatttttatatgaaatttaaatgaggagtataattattatttctgaattcccgtactgaggaaaaattttttgttattaaaggaggtaagtgattatacccacatcagaatcaacatagaaaaagtgtgaagcctgtttttcaatattttctttaaaaaattaagaaaacgacaaagctaacaacaacaacaacaacaaaagcccctgaaaagattaaatcctcctaaacctaagtaaatggcggaaaaccatttaccacaagttgccaaaatgttgtatgtttctattgaaagttttcactgaataggatagaacataatcacagttgaacatgaggacagtgatttcaaactgtttacccttaaaaagaagatgaagatcatgatggaggggttaagtttaaataacactccccctatgcgaaacaaaattactaagaaccaaacagatccctgtggaaaagtttgtatgattattgttctgactttccctgaggactgacgccatggtaggcactcagtggataccagtggtggaaggtggaggcaaagagcccttttataaaacaacaaggttaggaactcctctggcaggagccaagttcctccgagtttagatcacttcacataatgtgcccttgctaatgcatttgctggtttctcacgccttcctgccttttcctctccatggttactctgggaggcagagaggtgctaagcaatggaggtgtcatccggcccgcgcatctagggaacgtccttcagaggacaacttgtcaccagccgtcaaagaagagagtggctttgtggtctctgaacatctggcagcgctgcacaggaagctgagggggtgtcattaattgtgatgaaataatttaaaccatcaggaataaatgaggctgttaagctaagttcagattccatttgccatgcacatgtgtctagcagcctgtgtgcagttaaaagaaattgaattatattagctcatgagtagaagtgaaacagatactgtaaatgaaacaagttgctgtatagcgatgacatcgtgttgaaccatttcacagagttacagtttgtaggatcactgtatcaaaagtggtatattatttaatgaatttttatattataaaacattcctacggtatggagtatagtaaggaccagtggtttatgggtaggtagagaggatgtgtaggtggatgggcagaaagaagcaagccaccaggtaaaggtgcagtgaggtgggtgggaggtgttttgccaggctgaattgaggcacagtgtagctttctatagagtctggctgtgattgcaatattaggtgccctcgctctgtgtacatagtgcagcttggaggacagtttctctctgatgaccagatacgaatgttcctgtgagagcctctgacactttgggcccatccatgttgttttcttgctattaaaaacaactatcttgggcgatagaaggttactcctcaagcaagggaacatatttataaggctttgcacaatcagtgaacactgatttcgattgtaattttcaggcactaccgaaggagacatctccagtttctttacaaaggaaaaactgttgggtttggaatgtcaggacaactctgagtttttgtgcactaaatggatcaatggtgtgtaggttccaaagtatatttgtaaaataaaagccattcctttacacacaagtgaagctttcaaagttgaacttttatgtaaaaacaatcatggaaatttgaaaaaaaaaaaaaagagactgttactgtttaggtacagaaagaattttaaaaaaattactggagaggtaggtaatacctctgtcagaaaacagatacatggccaggcgcggtggctcacgcctgtaatcccagcactttgggaggtgggcggattgcctgagtcaggagctcaagagcagcctgggcaacatggtgaaaccctgtctctaataaaaaaatacagaaaattagctgggcatggtggcgtgtgcctgtaatcccagctatttggaggctgaggcacgagaattgggaggcagaggctgcagtgagccgagattgcaccactgcactccagcctgggcgacagagcaagactctgtctcaaaaaaaaaaaaaaaaaaaaaaaaaaaaagaaaaagaaagaaaacagttacaagttatggtctggaacttcggcaaatttggacaagagttgttttgctaaaaatattttatctcccttcaccccttcgtccctcccttaccttactgcctttcttattcactgtcacctgctgccttttttcttcctcctctctctccattttctcttttcctttccattattctctctttttattttgcatcctctcatttttgttacaattgattctcatcctctaccgtcacagaaagtgaactgcaattccattttcatttataatgttggttttcctgctactagttaaaagatttatatctataattacttagtttgtaaaattataaaatttaggttacatttttacataaagttgtgtgaccattggcgaattttttgaaagaaagcaattgaaccttgattaagctttttaaaaggaatgcagaatactcattgagttatcctcttccctggaccagaatgaaattgttattagtgaaagccagctagaagtttgcagctctgggttaccctctcccttcttaactccggacacaggaggaagacattcaggttgaaacacttgtgtttcccctaacttgagacgtgtttgaagttgaatagaatgaccagtagtcaggatattgctactgtgtgtgtgtgtgtgtgtgtgtgtgtgtttgtttgagacaaagtctagctttgtcccccgggctggagtgcagtggcgcgatcttggctcactgcaacctccacctccgaggtccaagcaattctcctgcctcagcctcccgagtagctgggactacgggcattcaccaccatgtccagttaatttttgtatgtttagtagagatggagtttcaccatgttggctgggctggtctcgaactcttgatctcaagtaatctgccagcctcagccacccaaagtgctgggattacaggtgtgaggcaccatgcctggccatgtgtgtttttatctttaaattttattttaattgatggatagtatagaaagatgagttcttcagcctatctcttgacactgtcggacagattgaaggagattgtgcctgtgtattagcttttggctaatagtgaatgcattgttgttactgtgtaaattacttttactagcttgtggtggccaagcacataaaaattagacagaatttttttctgaaattttcacatatcttgaaaaattaaatattatttacctaaaaacagttttataatttttccctaaaataaggaatctaaagaacacagaaaattttggaacaagataactatgtttttctttttatctttcttaattcgccttctgtaatacatctgtttctcaaaacaaataagaaaatgataatatcttcaacagtgacttgtgctttctttcagaagtgtgttagtgaatatttacagggaaaaaaacagttcatgaacttgctttttttttctcctcccttgttctcacttgggtgtggtgtgaactggatgcccctacatattttcgagaccttctttattccgctgctgcggttaacttagcatctgcttaggcagcattaaatttgtgaattcctgtgtctcaggttctatatgtcagatacattgtggattaagtaaactttggttgaatggcctgagaacttaactacatttctgcattctctctcaataccaatatttctgtgagagaatgttacctagattttggacaaccaacttaacatacactgttcatgttggcaactgccagtattaatgtaagaagtattaaataagatgcttatgtttatgtatgttcctaagccatagcagcttcatagaagaaggaaaacatagagaaaaacaaaatgttttaattcttggcttaaatagaattacgcgtttgtgtttgggtgtgtgcctatgcatggattttgtatgtacatacacacatgtcatatatatgtatatatccatatttttatataagaatagctagtgatgttctgttcaaatattttgttggagttagtcataattaataatttaagagcacacattccctcctacatgtacacaaaagaaaaagaaaaattcttttgtttgagtagataatggaatctcaatttgtgttttcaattctttaggatcagtattttttcatgttttcgaaattaaaagctggaattgattgattgattgagacagagtctcgctttgtcacccaggctggagcgcagtggtgaaatcttggctcactgcaatctctgcctcccgggttcaagagattctcctgcctcagcctcctgagtagctgggattacaggcgtgcaccaccacacccagctaatttttgtattttaaaatacaaaatttcacatgggtagctgagattcaccatgttggccaggctggtctcaaactcctgacctcaagtgatcgatctgcctcggcttcccttgtgagccaccgagcccggccaaagctggaaattacttaagttatgtaacctaatatctttacagatttggaaactaaggtagagaacttttaagacttaaccaaaatcacgtagttagtaacacattcttcattgctgatgtgtcagagtctttaagatacaatttactaggttttattcctttagagtttaacaagtattatatagcagtattctaaattttttcttttcttcgaaaattaggccaggcacagtggctcatgcctttaatcccagcattttggaaggtgggcgaggtgggcctatcacttgagcccaggagttcaagaccagtgtgggcaacatggcaaaaggctggttctactaaaaataaaaatacaaaaattagctgggtgtggtgacatgtgcttgtagtcccagctattctgaaggctgaggcgggagcatcacttgagcccggaggcagaggttgtggtgagtcgatatcacattacgacagcaccactgaactccagcctgggtgacacagtgagacttaaaaaaaaaaaaattaactcaatttagtccttgttttgtataatccaagtggacttaaataaaggatgtaaatatcagttagacctcaggaaaggtgagggaaaggtgaagaagaatgcaaggaggctacatttttaggcattgtagtagttgtcttggcaggtttccctgtgaaaatagcagatcttcctgcactgtgtgtgaaatgtgctagcttgatgctaagaaatggaatatttgggtcttgcttttattttttcccttctacttttctagtgtcagttagtttagaatttgggtgttgctcaaatgccgattcttaaactttaagaatcggaaatattcccatctaataatctgtttcaaaactgccattatagacaactgaacagtggaattgcccaagaacataaaagtgtaaatctctactgttcattgagtgccagtggagagcttcaaggagcatatacgcagaccaagtccccttgaaatcaatgttatataaaccatctttaagtgccttcttgggtatggtactatgtttacatcttataagaagtgagctgaatagatagggtcgttgccctctaggagtttataatcaaaaacagatgatatagctgatatctgttattgtcttaaagtcctacaaataaacatcgattagatccataaataaaagtttgatatcaaagacaagtaaaaacctttttgcttgcctgattaaataagtaaacacacatcttcttccctacactgagactatccatgcgagttgtaaaatgactaaactaaaataatcatgacaccaggatactcctttagattgttattttttttaggggttttaaaagagtgctgacattaatatgatgtcactgatggtgtattgtaagtgggtctggattcagggatgtttttgtctttctggctaggaaattgggatgagattaattttcctccatctctggaatttctttatttctaactattcaatggtagtacttgctgttgtaaaccagcattctagaggacagtttaaaaattttatccagaccctcactgtgattagaaatcatatgtttttaaaattagctgtcccctaagcctctgggaactgcactaaaacaaagatgaggatatgaaattgatgctgtaatgagatgaacttatatatctaaaaggctttgagtggaatattagtccgaaaaggcaggttcagaactttggaatgaacagttctagttgtacgtttgagtaaagctataacaactaaaattaaatgtaaaatgttggcaagagagataggtattgagtttgataaaatattttctttctgcatgcttcaattttagtgcaaggtattataacagtcacttcattttttaagtgtaggggaactaaaacagcaacgctggggagactaaacatgaacccgtctcagagttcaacacattaaaaaaatggctgtccctactgcagtgtaggtgtctggctgtgtaaattaaagcatgtggatgcagaaattaattagaacagtcaaagatataaatcaaacttatttggtacactgatgaaatgatcattgtttatgagattatcttgttatttaatctattctgtataaacctggctggttagccttgtgaagtaataatacaattaatgtgatgtgatgatggtatactttttctcggtacaggcctgatcctgcagatctttcttgactgggacttgtgtatatagaagaccataagaactggaaattttaattagcaagaatgcctccacctctcagttgtatgtgtgtgtgtgtgtgtgtgttttttttttttttaaatctcagaatgttccctgggagtttattctttttgaatcattcatctactcaccctagaagaatgaagtgctttcagatgttatttcctcaaaactgtgcaaagtttattataagagctacctgctgtcttccagctatactgtgctatgctactgggtctcaaataaagagaaagttttacttataaatgaaaccattaggaatttcttgaataaacaaaggtttttctccctttgatatgcagaggaattttgtttgtaattatagtcatataagtctatgtctaatacatgcaagcatcattcattatcttttatatgagaatgcactcctgtcacctaaagagcagaaaacagatacactaagacaaaacaaaataaaaaacccccccaaaactaaacagggattccagctcgtaggaaaattgtcagcgtcattatttactatttgattcaggatttttgcttcgtgttgtttaccctgctttctttccttgtctctattcctttgactccgtgaagttggtttctttatgtccccaaatgagaactttgtttttggaaagttaaagatgtagattttatttaccttgctcttagattgcttcactactccatggtgttctcttactctttagcagaatttggcgacagtgtccaataaagtaactaataaattgtaggaaaaaaatgtcacatgtaatctctcttgtaaaaccttttatgaatggagcctgatggctggagtttgttgttcctacttaatctcataaagagaatggatttagaacaatgttcttttaggattatgcatagggtgattatgagtgtgatacgataaaatcgtaattatgatttcattttgtcctgaacagttaggattttttgctctggattggtctatagttgatgttaaacattttctttttttttgagatggatcttgctctgtcgcccaggctggagtgcagtggcacgatctctgctcactgcaaactctgcctcccgggttcacgccattctcctgcctcagcctcctgagtagctggggctacaggtgcccgccaccatgcccagctaattttttgtatttttagtagagacggggtttcaccgtgttagccaggaccgtctggatctcctgacctcgtgatccgcccgcctcggcctcccaaagtgctgggattacaggcatgagccaccgcgtccggccaatgttaaacattttcaatttgacatgtcagatatttggatgtattattttaaagatcttttgtctcatcttcataggagtgccccagatctccctgtttcacctgtgattatctgtgatgccatagcaacaccccttgctgttagcagagtatgtattatttctgtggttttgtgaatcagtaaccactaaaagatttgtgaccaatcacccatgaatgatttgttcagagtttgcttaatgagagaaactgtggcataagacaaccttacaatgtatgtacaggtatattttcactgttacacttggctctgttctagattatgcaacttgcattttcagtcattgttgagctatgtagatatatttggtggagtttgggtctgttttctgtaagcctttcagaacagtacttgtcaaaccagtgttaaaaccaggatctgctgactggagttcaggcatatggtgaaacaagatgccttctgggttaaagaggtgactaacggtgggccaactgctctcctttacttgccaaccagagcctgcttctcaaatctcatgggaggcaggcttcaatgagctgagtaaacagtatgagctgtatgtccagtttctattttggaagtgatgcataggaccagagctgatgagaaactctgggatatagtctaattttctgtcaaacagaacccctcgtggtaaaggtaaaggctgatgttggggtaaaggcactgtacagagattgtctcctgagtttggcttttccatgggctgcctgttcttttggatgtgaaaggctagatgtgttctccagcctttctgcacttccctagctcttttctttttaccacttatcctttcctttttcctgtgagttatttcattgcttcaccttttcgttcattttgatgcaatcacatattattttatccatacattttaggatgtcttttaggaggagccgatgtgatgtgggcccttatgtaaacagttgagagagtgacttgcatgaaggcattttgtttagggaggatcctagagtagaaatgaaggaccagggaaaaccaacacaaagatgaattactgagatgatcagtgccacaactgatgggttctcattctctctgaggccttctgaggaaatatttaaccattggctctcatttcccttgatccgtatggccgtctgagcatgaacttcccacactttttggcttgtgcatgtgcgtcttcaggttgtcaggaagcatgactcaggtggggcaagctcaggggaaggtgctaattagcgatcagtgggggaagttggttcatgcggctagaataagagacgtgacagagaggatttttaagtagtccaaggaacccatacattgtttttggttttggtctaaaagcatagagagctctggagtatttgctgttctgaatttctcttttcttgcatttattgtagtgtacttctcaggtgagttcacgtatacctttaccatcactttgttacttgaagggattgtttgcatttccttcaataattttatcttacctcttggaacattggtcattcaccattaggaccagaatgatctagaataggtaacgcatttcccttttattaacacaagtctactgctttatccacactaaagcataaaacagttatatcctatgtccttgattttggagtgggagaaagttgtcagctattcagccactcttaatattcttcttaaattggctggatacagtggctcatgcttgtaatcccagcactttgggaggcagaggtgggaagatgacttgagcccagaagttcaagggaacagtgaactatgatcgcgccctgaattccagcctgggtgacagagtgagaccttgtctctaatatattttatttatgtttatattctatatgtatattctaaatagaggtatttagcagaattctgccacagggtaatttggctctttcagatgttcaaaagtagacccaaatctttactggcattttccaatggtcctaggaacccgaataggtatagttaatgcttctattaaaccatgacatatgatagatcagtgaagatttagagaagagtgtaaggaaaaactaaaaatagtacccagtgggattgaaacattatgcatgctttcagtacttatttgatagaagaatctgtttcagaaaccaacttctaacaaaagcagttgaattacacaattattatatgtttttaaattgtagttacatatttttattggagtcatggtccacaaattataaggttaactattatcatgtatcatgcagaggagatgaaaccacatcaaagtttcctaccgtccactctaagctgcagttcaagtttctaacacgtttttgcttcttataagtggatgagctgatcttcatttctttttccgtggtatctgatttctttctggttgtttctgtttaaagaaatatgtactgcttataggaatgataatttaagcagttagagaagaagtagttctctatttgtgcaggtagatggaaggaacaccttgccaatgcataacatagtatctcacatactttaattccctcaataagttattgtattttaaaggtaaaagaccaggacagagaaacaacagagggcctgattctactaagaatttataactgttataagatcctcaaccaattggaagttgctgtctagtgagatgtgcatctcatttgctattttgctccaattcacaatagccagtactgtttcaataaaggaaaaatttagtttactctgctagaactttctcttgatctgagggagttggatagttggattatttgaggttaacataccttagcacctttagggcaaaatgtaacctgggggtgtgatagaatattccatctagaggataaggagttttagattataaggaaaattactcccttagtgggctcttcaggaacaattttttatcttgtggttggtcactttcaatatatggcagttgctttccattatattctcaggctccaatcaatacgtacaatattatgcaacttatagttacattataaccaaaatatgtcaaatgtggtttctgagtggctgatttacagtaagtcttcctcagtccccaaagtgggtattatgactaatttaaactttcatacaccaaagcaatttttttcatatgaaaatcgtgtgtcttgaggggggtggggtctgtagagacagaaggaacagtaaagcactgcgtcaacttactcacatacagattgatccattgtcatctcctttgcatctcatggattgttgtgaattatttgctcaccctgggagagacgtgctctgaattataataatttaaaatctgtgaatctattaaaaccgtatttgtagctctaaaaaaattgatattcactgggcagtttgcccaacaagagaaagtcaaagagattacacacttaccctaggtaacagcaaccaccctgccaattcttcctttgaaagaatacagcagacccaaattatacatctgtggataaggggagacaagaaaagaactcaatatatcaaaatcagaaagtaaattccacaataatggctacaataatgtttcaagatggtattttagcataggcctagtcattgaactaatcatagcttagaggggtttaaaattgtttaaagtacatcctgacgttgttaagtatgtttaccactctcacttgaaatcagaatattcactcatgtatggtataccctgagatcatatcggagaatgacaatgactgcattgtttggtggaaaaagtgaggcccagagtgtcacaatggttttctgatttctcatctaaaggtcttttcataggatacttaattaacacatcgagctcccgcggtatgccaggggctggcagtgtaaagatgcataagaagaagctaggtgcagtggtttgtgactatagtctcagctgctcaggaggctgaggcaggaggatctcttccagactagcctgggcaacacagtgaggtctcccagtgaggtctccttcctttagaagaaaaacaaggtgcataaaaataagctggtctttccatgggagcttcgctaaatgtgatcttcccgaaggacaggtttagtcctgttcatctttcaggtctcagcacttaccattgcgtctggcacttagtaggaacgtacctaataattgcttgatgtgataaatgccaatctttgtgccatggaatcacagaggacaggaaaaccaaggaagaatttaaaaaggggatggagttttagttgagttcttgaatagtgttttggggtgcaaatagagtggagaataggtaagcccacctaaaagatgctctccttgagggcaagaataaagttgtgttgatctttgtatatccttgtatccagcatagtgccccatacatagtaggtcctcaaaacatatgctatatttttttctgtatataaacttgaactatacctttcttaactttcatattacaaatgtggtaaatgttttggtttcaaaacatttcttgtttgattatatctaaataatttatgctagaaagaaaatgctgtcaaaaggctatctcatttaatttaattatgtcaagaagaagttgaaagtattatttgctcagataatcctcactttctgataattggaaatcgactttcttggactgttaaggatgaccacctcaaattactacatttggcactaagtggagagtcccactgttaattttcaattaactacaatgttgattatcttgtcagtaacaatgctttagttgtttttaccacctaatctcagttgaggagatcatggaactaacaagagcttgattgtggattttattcttgtataggccggttaaatttgcaaaaggaaaaactccttgaataaacatagacagcactccaaattttggttagctgttaaataaatggatgctattattacaaaagaggacttggctaaagaaggtagatcatcacatctcattaccatttggataaacaaccaaaacatgtattctagtgacagtacttttataacatcggcgtgtgtgcgtgtgtgcgtgtgtgtgtgtgtgtgtgtgtgtgtgtatgtgtatctgagtgatgtgtgcttttctgaaattagtatttagctttttagtggaaataggaagcctacagtgttctttattggttttaaattttttcagagtgtaatatcactctggtactagttcataactatttgaatttatctgtgaattttttaactgtagactgaagcagaaaaaaaatcaaaatatgtcaggcaaacaaaatgttcaggttgaataatgctaactacatttaagtgaattagcacttcctcaaaacatgaaaaatttgttaagaatatattgcttcaaaacgtgtgtgcatctggctttgtatagattagtgtagactacatttcagatgggcggcaaaacagatatatttgctgtttagataccatgtttaaactaggaaaacaggtctgctggatgtgtgttgaagtgtttagctccagaatcacccagtgagtctcagtaatgaaagctgacctgtggtttcttgaaagatgtttttacttaattgccaagatagcttagatgttgtttactgtgttgtcagttgcattgtagcatttagagaattgatagtgttggtcggtaacctttctgtgcgtgtgtttttaagctgttgtttctctcttttaatgaagcacgttaaatatctttaatgccacctacctgctttattggaggattcatgatgttgagaaaaaccaaataaaatttctatatagagttataggagagaacatttgcagcggacatagcagagatcaagggaatgccaacattaccagagtgaagaaaacagagaactgaagatgagaccaaaatcagatagatagagatgccctctggcaaactatagctctggaggaaagtatgttagaaggtagctcttcatagaaaaaaaaatgtattttatgggaaaaatattctaaaaaacccacatgatctcctatttattgaaatatgaattcaaattttatacaagaaataactcattgaaagtagttgtcaatgaagtagttattaaaattactgtgttttaacaaataaatatctgcattgaaatggcacaaggaaaaaaatggggataatttaccagataaaattttaaagatagtttctttaatatttttaatcctggaagtccttattgcaagtatgactgaaaaactaatcatggaaatatgtgtttttttcaattagttacagatgatttactaggagaggttcaacaggtaggaagtatttgtttacagatcgtttaggattataatttttaagaaatgaaatgcctacttagtaaggatcatgtttgtaatgatactaactccagagtgcctagatccgtgcagttccagggcttggtttcagaggaaataaattttgttctgattagaaaattaacttgcattatgcattttcatatctctgaatcagtcttgactataaattcatgatgctagtcaaatattaaacacactttcatgcttagtagcataaaatagtgtcaaatggtaaaataagatggtaagaactgctcaacctcaaagaatttacaggtctagtttaggaaatttgctgtgatttctctctctctctttctttctttctttctttctttctttctttctttctttctttctttctttcttttctttcctttctttcctttcttttctctctttctctctctctctctctttttttttttttttttgagacagaggttcactcttattgcccaggctggagtacagtggcacggtcttagcttactgcaacctccacctcctaggttcaagcagttctcctgcctcagcctctggagtagctgggattacaggcatgcaccaccatgcctggctaattttttctatttttagtagaaacaggatttcaccttgtttttcaggctggtctcaaactcctgacctcaggtgatccacccgtcttggacttccaaagtgctgggattacaggcgtgagccactgcacccggctgaaagttgctatgatttctaaggtacttccttaatttataaagaagttacaggtctagtttaggatagttgctgtgatatctaaggcacttccctgcttctgccatgaagcattgtgctaatgctgcctataacctgcctattctgaatttaagattcactatattctgaatctaagaataggcagggtgtaggcagcatcagcacaatgcttatggtataggtgaagcattctggtgctcacatttcacgtggacatgaattctgagagtttattccagagcagaacagcgttttcagctgaggacaacaaaaccttctccttattgggtctcttgtagatcccctgtttttttttgtttttgtttttttttgttttttttgtttttgtttttttcctgaatacccttattgcccctacttttattttcctttcatttttatgaatctgtcattgatgagcatcctacccaacaccagaccagattaggatacaggcagtttacaggaatttttaccgcatagaaaccctgaagttgtagttgcttcctacaaggccagaaattctcttcagtgtccccagacagtctcagctaaaaggagagaggccttgagcaaaaacttggtataggcttatgagtcaagaccatggttggatgcaattgtagtggaatttctctggataggaaagttctggacccatgaacttgtggttgggaggggtagtgagagtcagacattctgggcaaagtgcagcattagggaagatttagcatgcctctgagcaacaaaatatgtagatgccagccagggaaggactggcgtggaaaggagggacaaccttgggactctgaagtatgtttaggaaatcaataacgtggagcattccctatcaaattcagtgtttgagatgaaatgaatactgatgtcacaagtccagagtgtcatttttttgtcgtggtatttccctttacattgggaaacaggaggaataaaggcctattatttcgagaagcaggataaaggtggaatcgaggatcaatggagggttaagttttcataactaatctctaataataatggcacgttagttgggttagcccttttcttgccaggggcttacctcctcccttgttttggaccacacatttaatatagcaagactttataggtagactctaggcaagtttctataggtttaacagtacatttattcaatgaggaaattacttattaaggcaaaaatttatttggaaaaatctgttttcatgtgtctgctttcagatttttttctttcttattaagtaaggaaataatattcacacctgactctttaaaattttgttcagtggattagatatcccagcaggcacatttgaattgacgctattggacattattactctttctgagatttttgaaatgctcttttgtgttttttacctgtgtaaagtcaccggaatgcagttacagaaatacataattttagagcaaatattctaagaactagaatattagtaccaagaatatcataatattagagatcatgaagttcagtcccttctttttatagtatagtccagaatcacagagctggaatacataaccttcttggtaaattagaaagaactcatatttgtattagtttgaaaacagagtgggccaggcatggtagctcacgcctgtaatcccagcactttgggaggctgaggccagtggatcatgaggttaggagtttgagacgagccccaagatggtgaaaccctgtctctactaaaaatacaaaaattagccagggacggtggcgggcgcctgtaatcagcccagctactcgggcggctgaggcaggagaatggcttgaacccgggaggtggaggttgcagtgagccgggattgcgccactgcactctagcctgggcaacagggcaagactccgtctccaaaaaaaaaaaaaaaagagtaaacagagtggagtgcctatggatcactggaattgagcgagcgagtaggggaggtgttagggatgttattgatgaaatcacttggctgtatagtgaagcagatgagataatcagaaagggtataaccagaatagactgtaacctccttgagggcagatcataagctttcctttttctattgctactactgtttaaggcacttactgcaggtaatagcaactttaaaagcatttgtttaaaattataataaaaacacattgatttagtaaccttttaagaatggtgtttctagagaaggaagcagtagaaagtctccctgattttatgccatcaaatattcattcctttttctgttttaggtaggatattttctcttgttttattttattttttgagacagtctcactctgtcacccaggctggagtgcagtggcctgatctcagctcactgcaacctccacctcctgggtttaaatgattctcctgcctcagcctcctgagtagctgagactacaggcatgcaccaccatgttcagctaatttttgtatgtttagtggagacgaggtttcaccatattggccaggctggccttgaactcttgacctcaggtgatgcacctgccttggtctcccaaagtgctggaattacagacatgagccactacgctcagcccgggtattttctcttgtgatgagttaaaatctggccaattacctctgaccatgcctcattgtaatcagtatttattttaaggtatgactcctagaatttaaataaagtattggcgatgtggtgtaattagtgtagagtagaatgagaccttgccctgttgtacacttcataggtttgttgtgtttacttttttgagccatatgctctagaatgttttaaatatgtagcatcacatcatctaccatttagaggaccagaatatctattctgagtacacaaagtagactcatgaactaatatgtgaatgttttcccctctgaaggagaaatattgggagtttaacagcttgagtagaaatttccttttgaatggttaaccaaactggtatcacttttaaggtcctaaatcccaatctgtttttctagggaaacatgttggcagctgttcgaaataactagtggtttaaagacaattgttagtgtggttttctacacacttaaagcttagacctgctctgtcacttgtctttgatgctaaggagttgtctaagtagttgagttaaataatttcagattagttttatgcattaaatggtttggttttatttttaaaaacctctgttattatttaactctgtagtagacatttacaaaataatttttcttatgtgtatttacatggacattaaaaacatcttaagaaattaattttattgatgtttttaagttcaggaatgttctcacaacaaatcacacacacacaacacatgtagtctttagaaatagacatgaaaataagatcattagatgttcatgcctgcttaataggagtctccaaagcaatagaaatattaatatattggaactctgatggagggaatccctgagtgcagagaggaaactgataacactaaactttaatggcctcggaaattatgagacagaggactccagagtcttctataatacataccttagctttgttttcatctctggggaactaacatacagctatatagtatactgatcacttccccatatactattgaagtcagtctccaagtaaacttgtgatttagtaagggcaggtggtacatgctgttttataaatgaggaaactggttgagagagtttatgtggtttatccaagtaagttcaaacagttaataaggactagctatagtaagacttaaaacctagggtttttttgttagaagatgagtatattacccattacatctgttcttctgatgatacaggaatgaggtaagggctcacaccttctttctctctaggaatgaagaaaggaacccctaggttgtaaaatcaattttaccacatgacgttgggaaggttaattgcttttcttgagcctcagtttccttacatttaaaatgggaataatggtatatacactttagaatatttaggattaagttagatcatctacagtcatccttcagtatctgtagagaattggttccaggacctccctcaaataccaaaatttgaggacggtttagttccttataaatggcattactatgcatataatctatgtccatcctcccgtacacttgaaatcatctctatattacttacaatacatagtataatataaaatgtaaatactatgtaaataattggtatactgtattgatttttaaattactattatttttattgttgtgttgttatttttttttcctgagtattttcaatctgcagttggttgaattcatggatgcagaacccacagatacagagggcctattgtatagcagtcatattggctggcacattctgtggaaacttagtttttccccctttttgtcctttctctttttctgctatccaataaagtttggctttgtttgtgaaggctaattatagtccgtgctattggataccttaggcagcttatgttctgctaaagagtaggaggtgcacacataaacaaggaactaatacaaagtggtatgtattttttttttttttttgagatggactttcgctcttatggcccagtctggagtgcagtggcacgatctcagctcactgcaacttctgcctcccaggttcaagctattctccttcctcagcctccctagtagctgggattacaggcgtgtgccaccacgcctggttaattttgtatttttagtagagacagagtttctccatgttggacaggctggtcttgaactgccaacctcaggtgatccgcccgactcggcctcccgaagtgctgggattacaggcttgagccaccgcgcccggccccaaagatgtgtaattttcaaggggaagtccaagacattgtgggcaagggatgcaaagtgctagtaaatagtacaattggagaacaactaattatggggtccctagtgtgagtaaaacttatttgggggtgagatgttagatttgtaaaatattttgcagggaataatttggctgaatacagatattaactgaacatataattctgtttcaggcatctatttggttgctggaggtacagtgtaacaaagtcctttccccttggagattatattctagtggagaagacaaatagtaaagaacatataagatagggagtataataagggctatgaagaaaaaagcagagaataaggggatgggaagtgaggctagagaggagcctgttattttacatcgtgtggccaagaaaagcaacgctgaggagatgacagttgagcagagaactgaataaaatgagagagcaagccctgcacagatcaagggaagaatattctagcagagagaacaacaatgacaaagaccctgatgcagaaacaagcttggtaatttttttttttttttttttgagacggagtctcgctctgtcaccgggctggagtgcagtggtgcaatctcggctaacttcaatttccgcctcctgggttcaagcgattctcctgcctcagcctcccgagtagctgggattacaggcatgcaccaccacacacagctaatttttgtgtttttagtagagatggggtttcaccatgttggccaggatggtctcaatctcctgacctcctgatctgcccacctcggccccccaaagtgctgtgattacgcgtgagccactgtgcccgccgcaagcttgggattttgagaagcagcgtggttgccagtgaacaggggtcctgaaattgcagaagggcacgatgaaacggagagcccttttacatggcggtacaatagaatttgactgtaatactattgtcagggccctctgcattaagtcagtgcacgtgtgtgcattcacatgcccccccccgccatccatctgccatttacccacacctgtccatctatccatccattcagccattcagcaaatatttattgagtacctctcttaagttagccactgttctaggacctagctctcaaatgaattcatgcttaagtttaatcacattcaaaaaaagagacagttgcgatgatcaatggtttgtgtatcggcgtaatgtatttttctgatcctagttgatgattttaagacaatgtaaactgtcaccttaaaatctaatgtgtccttcagccattgctttttagagggaaaagagtgtaagagaaaaaagttgggtggggggtgtgggcataagaaagagtgccttcaacatctgggtaaagagagcactggttatttggtagctggattgtctgttctgggatagttggtaaattagctgtgaggcaaagtacagtctttccttaagagacagaccaagttgtttattgatgctggggaggaaaagggctgggcacatgcttataagacctatgatctttcccagaatttggaaggataagagaattgttaagaatttgacattggaactgttccctctaattgtggcttagaccatttgatgggaaaaaaaatattaaggaatccaggaggtgatatgctgaacaatatggggactattcacggtgaaaacaagcatttacccaagcatttgaccagggtaatgtgtgttttagtttcaggtagtagaaactgaagtggctttgtttcacagtgacatttaggaacattgactaaaatatactgggctgtttaaagttttgttttcttttttccccctctcccttacagtactccccctgactccaaattctccagccttatagctgtttccatgttttgagattactgcaaaaacacttaatggcacacatatgaaaatttttgtaaatgtctaaatagtttaacaatgaaaattttcactcattctacatgtattactgatttggagaatttctaaattgctgcacagttttattgcaatgtagagatgtccccattcccttgcaaattagtaaattaggatctccttctacctctgagtgctatggatgccatcccttctcttgtcccgaaattccggtctattattgaacttctgtttattctacttagggggttgattcctttaaaagtgtattattacatatattaaacataagaattttagaaaatcagagattacaaaaagcaggaacatcatctgtaaccctaactggcctgccctaagatcaacacacctatgtatcccaagtagcccccacaaattatgcttcaggtgacatcatagtatgatatataatattgatatgatgtaatgtcattgatgcatttgtgtatttgtatgtctgatattatgaacagccttctatcatctttaagagtctgcacattattccattatatggataaaacagttctcctagagtttatttctaattctttcctattattaatacacgataagcctctttctggtccaagcacattcccttcagcctactgatggccaagtcacacctctgtttccatctggcagtccctttctctcaacttccattcagaactcagcctttagaaagaggacataaaaaatttgtttcctcttctgccttagcctcccacagtctagcttctgtttcttgtcttctccacaacaacagctctggagcgctgacctctcatctgaagcatattgtagaagcgtttctgttttttttacttatttctctgtgacatttgatgccactgaccacttttgctccacctttaagtctttggattttctaactcttcattgttccagttcaatctttatttttctgactccttgttttctagttcatctttgtatccttttaaacataaatcttttccaggtattctatactgggttttcacctgcacacttggggtagttgtactcattcccattattttaaatttctgcagatttgatgttaactgcccacctgtttctccaacccaggcttctctgtagggctccatatttgtatggagctctctcggttgatccacttcaaaactaagccagtcagaagctaaatttttagtgtctacccttgccccactatagtcagcctccaccgttctttaaatagcatcaccatctggctagaaaccagaaagtcagcttagacttgtccttctccctagctcatacctccttccccaattttaaatggcaactgacttctgtttccccattcattattctgcatccccagtgcctctaatcttgtaaagattccctctgtgaggagttgttttgaatgggtataaatttagttatataagatgaataagtcccagagatctgctgtacaacatattgcctacagttaacaatatgatattgtgcatctagaaatttgttaagacagtacttctcatgttaagcattcataccacaaaacaaaaacaaataaaaccctaaaggtccacatggaagcttttggagatgatgaatatgtttattattctggttgtggtgatggtagcatgaatgcatacatatatccaaactcaccaaattgtagacattaattttgtgtggttttttgtataccagttatacctcagcaaatcttgaggtgagggagccttccattatttcttgacttcagactccactttcaacattcttgaggctgtttctcctactggtactgtgaattctgtctctccccacccccgaatcctaccatcagttctcctggtgcatcgaatgagacagaaactcctcagcatgggtggccccattgtcgtccctttgtcctttcttgtaaccacttttcttgtctcctgcttttacgggtgagtagagttctccctttcctccattctcgaggtagaattaagcacattctcttctgtgttccctgagcacctacacacagggttactcagccttggaactggtaacattttgtgttggataattctttgtgctacactgtgggatattcagcagcttcttgacctctactcatagctaccagtaactgtcctccacactcagttgtgacaaccaaaagtgtctccagacattcccagtgtttcctgggtgacaaacctcccctattaagaacactgccttgtatgtgcctcttctgaagtacttacaatgcgtggcgaatatgtccacacgtgtccatcttcattctgtcagaggtcagtacatctgtggcttctagaacagtactgagatcagagtggcccccagtcagcacgtgttctttgctgcctgactgtgcatgccaggacagtcgttcgctgctgctctagacaaatgagaaaggaaagtcagcaattgtggagaattttgccatttggaacagtttggtagtttgataaaaggctttgctttgtaataagtgaattcaaggaaaatattctataataggcacgtgagggaagttgtataatatcttttgttagaattatttcaaaaagagactcgattttttaaaagtctgattcattcatttaattaatttgtcagtaatgcttgaattttgttttgtgctagggactttttttattcctggatgaaatagtcctgcctttttatggccttttagacttttcagatagatagtcaaggaggaactgtaatacagtgagataaaataagtcactgcaggggagatttccaagatagttacctgagtctcatactgtcggcagatgcggcctgcaggtgtgtataggggcaaattccaagtaatcttaatacattgatgctttgtaggatttagcaataagcactgtccccccatatttgcttttattcatctttattttagtgaatttggagaatttgtgttttaagatagtggcttaaaattagcatggtcatgaagcatttaatatttcctttatgctgtatcgtaatgattttccctcccccagttttttcctcctttacttgaatttctgtaatatgaagcataatgtggcaaggattctgatctcgtggcctagtctgtctgcagaggtgtatgtgagtgagaccccttttaatcattcgtataatgattggtggctccctgttgttaaaccacagttattgatctatcatttctgaagtacatggctgaaggaactggtgctgtcaggcattgattgactaggaaggaagtgtagagctattctaactcacttttattttcatcagcaacagttacagtagagacttgtgcaagacctccatgatggaacgtcatttttcctgcattaagaggtgtctgatgtgactgaaattgctgggataactcaaactgctgcatttaaaatatttagaacagaatacactgtccaaaaccttcttatctgacttggctaatggttcaggctctggaaaataaatttgggggcatgggggatgggtaaaaaagaacagatctagtataaaattgttccaaagcaaattgagcaacctatatgttaatattttactgaagaagtatatctacacaaattaactcagacaaaacaagtgtgtttttgtgtaagttaaattgtttaatggctgttcaaataattaagttcaagtcataattaatagctgtcttttggtactgttgttatgttttggtctgtttcaggaggatttgggacctgcatgcgcaaatattttagataaggatataaactgaagatagtaaaggtaattattaaaagtgcctctctttcattagcacaacttacgtacattttaacatctgagatgagcattgtttattttaatggactctttaataatgcttatgttatgccctgaactctagttagaatgaaaatgagcaagaacaacaaaaataaatggtgttggggttcggcagaggaaagatgggaggagtgcattaagagagtgaaaccaaaagagaggacaaaaaatacaatttctactgtagttgcctaagagcctgtgcttttgtccctctctctgaatgttttatttttgctataattacagcatcttgcctgcactttgtccctctgatcctttgttaaagcccagatcactctgtgcagactgcgcttgtaggtgtgatttattgagtgacaagtagctgtagggtagaacacccgcctctgtacctgagtaaagtattagacatcacagagctggggcaggcaggaggggggccgaggaaggagtgggggaggcgaaaagcaaagagcagtaacacagcagctcctggatacagatcagacaagaggttctgccacaaatcacctagaaacatgtcagacgctgcatgtttgttgttttacactgagggcacagccgtagtccaaaagtattgattcttttctttgtacagagacagagactgtcagacctagcaggctgaccttggtatggtgcagacaactattccccaccctgccgaccagatgaaccccacaggagcagcctaggcaagatatgccaatgtccacttcacaggcacagagagaaaccgatgcctgctgaaacggctccttctgtttcccaaacacttcccccgccaggcccccagagtgctccttgtgacagaaaattggaggcaggattcttggagggagcgtgtgtgcttttttgtgtgtgtcttaaaacacacaaaaagaagccctttttatttcatttgtccgtgagataaactgaaggatgtctgggcaatggtgtatatgtgtgcattttgtatttaaggcggcaagaggagatagtttattttctgtttgtacatatcgaaggggagatttctgtgtgtgggcacttacatttgtgagtgcgtgtgtttcccctcttctctatttcaaaagctttggtgagatggggaagagtaatcaactgtcacacttaattgatctgcagttattttaaaagttgtttaacagtaaaactacacagacccatttgtccatatgaatctgcaggtctctttatagtcttaaaattcactgtactcttaagtcattttgcagcatttaaaaaattcatttattctgaaaatcaggtaattttaaactaaaaatactagtttgtaatttggagatcatctaatataaatagaaacatataaccgccaacattttgaaatcaagagttcaaaacttgatcccgtaaaccattagggagtagggcccacagggtgcccttgaggaagtataccctatctcctgttgggcttggtgtgtcaagacttcggtttgccagaaatgcttgcctccaagtagaaggtgtttcagttactctttgctgaagctgagtgttttattttgactaacaataacagggaggatgcctttctccctttcacttttaggaatgttgttgcatgcacaacttctgtccataagattgagctgtccatgaggaaaaactccagtagatttcagatttgcccgaaggaaaatatgaggcacactgatggggaagaaaagtgatgatatcatgtgcacttagggtgtaaaaacctctcctttaaaaacgaggtttctctttttcaagtaaaataatgcagacaggttcaatgtgtgtaatactatattacatttgtataattcactttaaatcttttattaaagtgaatttttcaaaaagtagaccactgaagataaaaataacaagtaaggcattcactttcgtgaaaagccccattattttctacatctccattttcacattcatcctatttgtttaagtgactggtttggcaacctaaaagaaaacccaatggttaaaaaaaaacatttgttttatagttagtttttacttgtttttatagtatgagatctctgtgtagtattgagttttgcagactcctgagagaaaaaaaattctaataaaagtgctattatctgaaaacaatgactcaattaattattttggtttcttatgttgattctaaatatttcttgtttctctttgttgggtctttatgtctcatccaaaacagatttacattttgaggttagaaacagctgaacaagtctgcctttgggtattaacaaaataagcaaactatttaggatatatcaatgtctttacaaaaggatattccacttataaaatgggagctgaggaacacatatgctgtgtaagaaataccatctaagaaaaataatgcatagaatagattaggaatggtttaagatctgaacactcaggattggtatttcttaacactctattttttattttaatatatacatgctaatcgtctttctctcttctccgtatatgttatagtcacttgatttactactgaaattatattgcttttgaaagtgtcagttgagttatcccttgccttgttagtatcatgtttgatttcttggacagagacataaatcactatctcatatgcaggtcttttgaagacgcacccaaggtttattgccagtaacagactagtggccttatgtggactttccatgaataaaacagattgatgagccattttatagcatcgcaagctgtattataaatacatcacccttttcagtaatttaacgtgaggaacagcctaatgagctcccagccatgatcagccagagctgggagttttgtttagcttctaggacaagtgactggtggagggtaagaaacccaaaccctgtattgttttccccagttctgtgacaaaatcttgtaatatgaatcatttgaagtaatagtaaagtaaagatgcatttagaatctgtcagagtaataaagggaaatgtaaagtgggtctgattttgcttatagctgaaatctaaggttaagatgataggctttttaagttacttgtttttcttttactgattgaagtcatcaattgaataaacagattctcattttgaaatatacatgatgtaatatctacctgatagcttggaaaaggaacaggtagatatagttacaacatcgtaacggtctcttttgaaagtatagcttaagatgaccattgtttctgtattcaagccttcttttttgcatagcttacaacactttacctttattttttcattaatccttaaaatatccctgtggaataggatgagtgggtggcatcttagggtaaacagttactatcctttctggtgaggaaaccgaggcatatagaaatggttgtttttaaagagttatctgactagaaagaaaagcaagataaaattaatttttagaagtgaaaaatattttgcattacgtatagcacatgtcaatatttacaaaacttacacaaacataactttgtggacctataattttctaaaagtttggaaagtaggcgacacttaggattggaaaaggcatagctttgtgaataatttttttgctacctggaagctgcaatatattttgagctagaagcttctataagatatttcccttttctgaatgcaattgattatgctatactgcataatactacatttacctatatataatccagttaaagctgtattacatatttatagaagtcagactttggtctgaaatgccattatttataaacacaaatcagtgagtaattagtctactgtgtaaaaaaaataaaaaaaaattttgaaataatcttttctactgtgaaaacagccaggcagtttggtggactctgttattcatatgtcagacgggaattaccttgagtgtacagggaagaatgaagaactgaaaaggctttaattttctttaaagaataggtaaaaacagaatattttaccactaaggcatgaacacatcagtgatgccctaaccagttgagctcagtcctgcctacactgagacacaatgcactttcaatttaaaaatacatctaatttaaatggaatggtcctatttatgccctctgttccttattaaaaatggtcgacaagtaaaattccgtttaagaatacctgcagacagtcaatattgttttgaattttaaagagttcctgtgtcttgtgaatgacattatgcctttaatattccgtattcagggcagagtccttttgaaaccaactgtgcatttatctccatttttgctttcttggtctttgccttcctctgccatgcacccagggttgagtgctgactgcaggtctaagcttatcagattggatgaacctcttcggtgtctccattttggaaactgtgggtgagaatttaatgttcccctagcccacactttgaaaatgcaagattacagaagatttatgaaggcctctgtgtctccatagctctgttctttggggtacctctgaagtttactactgagcgaatgatcttggcatgttagtataggctgagccaaagtttgtgctatattatttatgattctatagcattggcctctcaaacaaatgaagtttattgacgtatcatctggaacaaaattttggctaattcataatttatacatcagaaatagatgcctttctcttatagattgtgccacttgaacataaaataagattttaagattaaaagaaacagaggcctgtagaagtggcttttcaagcttgtagtcactgatggttttttaatccctaaacaacacaaaacaaaggaagacagaatatgcttttccctctcccatacttcccttttctgtctctaattgtaagctcttgtgcaccagtgctcctacttttcctctgagtttagtgatagttcataagaaaagcattaggcttatggaaagaaagatctgtcgccagtggacttgattctcccttgtgatttataagggtctgagaaagcagtcttccaggtcttctcttctcaaggactctgggaaagtcttgttcaaaactaatggttcttaaagaattggtcagctgcagaccactggcctctcaaaacactgggtggttcaggtggatagcacacactgctttgcaactccaagatgcagtgggtgtgctggggcccgtgagtccgtcctggaagacctttggaaattctgtgttagtcaggctcattctctttcacttgatgtgcgcacagatttttgtagaaatcatttgatatcccagtagtgtacaaagcatgggatgatatatgcattcacacacttacatatcaaagatacacttcttctatgtttttgtctttcatacagagtctaaggcgactaagtcgttatgctattttagcacataaagatatcattggttttaactcaaagtgattgactcaaactatatttttatcatagtttgagtacctcatacttgttcactgcccttatgtgcatggtcacctttagagggcataattctgctaaaaaactattcctaatgaattgcaaatggagatgagttaagtaagctgtgttaattatgtcatttgcaagattgtctaatgtggaattggtcaagagactggaaactgcttgtcaaatgtttctcttaactaatgtgatagtttgtggtttgcaggtgacacaatttccataacttatttgatggagcctcattaaccaccccttagttcgccttagcaaaattatgttattaaacatgtcatgataagttctgtcctcattactttgcattcggcacagtgaatagtgtttgtcttgtgacacctctcccaggtccttagtcttcgaggaagccaaaggaattccatgttcagaattgtgtttttaagctgctttccagcattacacacatctctcttgacttggctaatagaacctggatgtgttctcaatcactgctatcaccatgcagtccttatttagccctctgtcatttctcctcagagcttggtgtcctgatgttctactgtcttaaatagaaacccaaagaatctctgaaccatatagttttagttaaaaacagccaagtgtatggcagtagtaactgtgatgataattccagtagtggagcagttttcgtttttcatagcatctgcctcatctaggaaatcttcacattagcagcagagcatttatctctctagtgaataatttttatgtttgcccatgtttgttgcttagtgctgagaaacttcatatgtctttttttaaacacacacacacacatattttattgcgtacattggtgactctctgtaattttgtcttcaaagggaccagtctcagagatactttacagtgattgccttttagtatttagtttctgtcacttaattttttctggtggtgggaattcatttttgttaatgtataaaatttttcaaaattgggagatggttgaataagattagaaatatagttcatggcagtggaatagactagctaatccacaagtgaactggaatagcatattgatctaaatgtataagatacctttattaaacctgcctaagaggatcatatttaatatttattttctagtgagcagtattgtacttactaaattgatgggaatacacatattgatgaatctcttatattttacttgaaaaattctgttgaaggctactttatcctttaacctgataaaccctctctctccctcattctcaaaaatctcatcatggttgcacttggatcaagcttcttcataaagtcattgtcatcttacacttttcccagaagcgtcaccctaggggaaaaatgattgtgtaatagaaaaactctctctgcattctatgcattgaccattcattatcttccatttggctaccctttgacctcctttccctgagccacatagctaaccaggtcggcctctgtcaaagtctgtctaaggatgttattcttcctgtggtctccctttttctttctaccttctaccggcccccacccgtaccacacacattccgccaattctctgtgcagacttgacataagattccaccccaatccttgttatgtaacctaccacctacccctttttggcaagggacacccgagtcagcaagttgcaacaaagagtggagttaattggaacatgtgctgtgcccaaatctcaacaaagaagggctgatagacatcaggaaaacacaaccatatgtagatgtttgcttgaggaatatgagtgtacatgggaaatatcatctacaaccaggttgcatttaaataaaatcaaccatcattctcctctttgtcttccgacacccctttcccccacatgtaatacttttaacttgctctctcatgtctgctcatgggtgggcatggtctactaaactgacaaatgaaacagatctgtctgtgatacttcatatggggaaccttatgtaacttatgcgggggactcagctatggatgacatcccagtagaccctctatggattcccagctgttacaatatctcataccctttgtgaccttttcttctatttttgcatcccttttagaaatttaggatttttttaatttaaccccgaatttcttaaatgtgggtacaatttacacagaatgaaatagacccattttaagtgtacagtttatgagttgtgacaaaatgtgtatactcatattaaactatcgccccaaccaaagtacgtatcattttctttaccccataatgttcccttatgccttttccagttaatctcctttcccctaaggcaaccattattttgatttgtcacaatagattcattttacctgttcaagaactttatataaattggatcatacagtatgtactatgttgtgtctggctttttttgtttgtttttctcatattgttgtgtgtattagtagtttgtgtcttctttattaccaagtagtatttcactgtaaacaacagccatttaaaaaatgaatatttagacatattttatgagttgtttctatatagtggagacatcttaaaattgcagcaactcttgagtttaacaaatagttgactgtcatcagactttcacttttttactacttccctgcccaagggtgctggaattccccagctgtgggctgaatgcccatcccaaattctcaggcttctgggtattcttggttcacatcctgaacttcagaaggaatggtgacctccagttcactgagatggtttagaacatcttaaaacttttgctatcctcacttacgttgtgaaactgttttgctaactggaaggtagacgtgttgctgtgtacaagtgaggattctgaaacaatacgaaggccttttcagaaccctgtggaatgacctgaaaggaactttgtctttgagcgtctcctgatgtgtattttcgataatgtatcctgccctcagtgtttttctctgtaggttttaaaggcctcagaagtcccagaatggttctggacctgagttgctacttgagaggatcttgtaatcctgctggtctctagatacctttaggacagaagtgctgggtgattaggttaataatacttattctttattaaactatttaaccattataagcaatatgctaagaatttatgtacattaatttatatataatctaacatcctgtttatgttaatactgttattattcccacttgctagctgaggaaactaagcctaaataacttacccatggttatacaactcttgtgctgtgatgggacaaggatgtgattccagatctgacatccagtcccaccaacattctattctaagtcccacaaatactttctggacatctcctcccaagtataaaatagacagtgtggtaatgtacatgtgtttagtattgggtataaaatatccagtgtaatataattgttaagctattgaatattatgaaaagtataaaaatgtgacgtgaactggagcctctaactgcattgaattcttttcatttaagggtcttagaacatgtgaaaaggcagaaaataataattttttataaagaatagtagtaagaactgttgtgcacattttgaaggtgaagattttgagacaagattctttaacttttccacagcaatatagagttagaagaaacctagactgtctccctgtgcctcttcctctactctttcaaatcttctttttctcttatccaagccaaggttcaaggaacattattaattgttatcttttttacctgcaagtcatagacaaggactagagaaattcttgtatgtgttaagagtttacctaagagactattatgacagcagtcaggaatgatttctttaaagtatgtaaatgtagcgtcttcattatggcttagatttacaatgctgacgactttgtgaagcagagaaagttgaagagttaggggctgctttacgaagtgtactttggaacagtttctagtttctttcaaactttgaattgaaagagaaaaagcaaagtaagtacctaaatcagcactagccaaaagaaaagaaagagaaagagaaaagaaacctgcacaaggcagcagctactctccattgggaagctcatcccctccttgacagttgctgggctggctgtgcaatgtttgatatgtgctacttatttactgtctttctgtttctctcttgatgctcttagactgacactgtgttaactgtcttatgccactgattacatctttcctttcatctttgttatgactagtttaaaggataaatggtgattttctataaacacaatacataagcttaaagaaaaagatgaacattttagagaatttgggattattcagaatccctatgactataaatgacttagcatatctagaatgcaccgagttgatttatttttttctattaatagtcatcatgattagatagtaccagctttaattttaagttttgttgcctgtgaagtttattttcaatgctcaataccatccaagagagaatcttgtttaaaaattttaatcaaaacatatttaaggtgcttggaacctaagggatcacttgattcaaccttgtcatttctctgttcatcttgcaataacttgagggggccacctaaggttattctagatatctagattcttttcctcttcttgccccttgactccattgataaattgagaatgaaaatatctctctggaatatcttttgatttggtatgtataggaaactttgatatcattgtagaaaggcagaatagaaataaaagatatttcaaagtcttttgatgtaggttaccatttgtaaatctgtgaatctctgctttgacttcctgaaaggttatcagaaagctcttctaaggttctcttggggtacttattacaggcgtataggtgtagccctaccccattccacacctcccataggttcttctgaaagtttatggtgttaagagaactcaagatttttaaaactggctacttgttcctattgttcttgaggaaaattgtgctgaagacagctgtttgaagatttctttaatataaaatctttaatcttaaaccatgctgaggaaggtcagtttggggcagaaaaagagccatgtatttgtcccatttactccagaagaagctaaaaatgatttttgaatagcagctacccttataagtaccaagaaacatcagatgtgattgctgcttttcacatgcttagaatataatttctccatattttttcatgcaaaaaaagcaaagaattctagaattaaaaataagagggacctaagatcatatatggtgcagctcctaagatgctacaccataaccagtgtaaaagttgaatctttgctggagggggctatgcgtggatatttttttcactttccgtaggtgattcaaatgtatagccaaggttgaaaaccaggaatgtggattccagaccagcctttcttacttatgtttggggttgctgagacttacagaaagtaaaattattctgtgagtagataactaattatttgagacccaaattctggtctcccagaatttggtacctcatttttttttttttttttgagacagagtcttgctctttcacccaggctggagtgcattgtcgtgatcttggctcactgcaacctccacttcccaggttcaagcgattctcctgcctcagcctcccgagtagctgggattataggtacgcaccaccatgcccggctaacctcatacgttttaatcccaaattaatgccagctctatatagaaaagacaggtctgtgatcattattcatctgtgtagttttctttctactgtgataatcatagctcagtttagggagcacttactgttggcctggcaccatgacagcagttttacagggttactttcttaattaagtatactcatattctcgtttcacaaatgaggaaacaggcccaaagagaaagtaacttgtctacatttttagagcaagagtaagtggaggtgctggaattggaaccctgatagttagattccagaactgtgactcttgaactacttaactgtaccttctcctagaaggatttgattattgcttttcattccaaaacaaagttttgtgtagactatttaagccatagggactgtagactgtattttgaaagccaaaattaagaaaacaaaaaatgtggccccaaggcactcactgtttttcttccttgattcttgaatcttaagacagcatgggatattagtgatgacagtcttcctactgccaaatggacgcttggccactagttgtagatttgcttcaaagattttgtgtcctcagaagtgaaagaaaaattttagtgaggcacatgctgtgggaagggtggtttggtcagtggttttgtagtatggtttgtgttgttttctcagtgtggagaaaataaggaaagctatatagtaaggaagaatatgttaaaatatgtactctacctttcaaagaagagtccagggtgagtagcaatgctagtgccacctgaaagaactttggagatgtttcttaggtcagaatgaaaagctgttgcagtattgcctaaaatagaatttataaaacagaacgctattgagacttgttaatgtttacagatactgttttctttctccttttccttaaaaaaatccttatgtgctcactttaaagtataaaagtaaacaacaaaacttgtattatattaggtgtaatttcaaggataacgaagtggaaggagcatgttggcaaggtaattttctagtatcaggtgagtgttttagaagaagggtcactacttattttggcttatagaacatgatggtaaatcagatgataaatgttgcttaataacttgctgcattgggtgtttactgaattgcgaaggaaaaatctttaaccagtacgttagtagatatttgcctgtgacttttaattaaatgttaacagcaaacagaaaaatggccattccattaaatagcatcatcttacatggtattttgattatttcttggcatcttccaaaaaaagggaattctcatgtgggaatgatggctgtagcttagagagaaagagagtttacatatttgattacatatttgatacatatttaacatggccatatctttgtatatatgctttatttcatttaatccatatgcccccattgaaatgtaacatttatttggactagaagttttggaatcttagctggaaccactgatttcagacacttatgtgatagcaggattgtttagtccaatatgtaatttgcatccgaatactttattaatctagaaatttttagtggtgaaattaagttatcttttgaaacagtctagcaaattagactaaacaatcaggaaattaattaaatagaggcaacagattgggatagtaaacctatttgtaatattaataatagctcactttaaaatatctgagaaagtgcctcagcaaatttatttggtgtagatttttgtgtttcccagacatgggaaagggaaggttcttgaaggagagaagaaatgtcccactcatctgaccacttcctttctgttataatttaagatcttttccatgattttattttaatcttctcactgactttttcaatgatttacaatctgaagtattttgaaaaattatcatactgtgcatactgtacatagtgtgattacttttgtgcagggatttaaaaaagtaatcagtggtctttctttgagaatgaacttttctggtaatgatttctacaacatagaacaaagccttcattctttgtattttccagtagttactttatccagtaattctcatgcatttctctgtgagcatttctaaggtcttgttctgagggtccaatttcctatattcacatcctggcacatctgtaaatgctcacagtgatggtgtcttaactctttctagagctgtgaacgtactgcttcttgagttcttagacacctctctttctaaagtaacaggatcctagtgttagtttcactgtaagaactgaaatccagaacctggatgtcctgtgaccacaaggggcagagccaggtcttggttgcagctgttctgatgcccagtttggactcttccctagctagtctgttatgctgcaagctgaagtttacaaatttgatgcctcctgttggggtatttctgaagggtgtatagggttatcaaacactcttaaaatacatgcctaaggtcatgcttaatgtatacggcaaaccatccctcacagtttcttgcataaacttgaatatgttctacatgttttctcagcctaatagaatgaccgcttaattgagttgtataatttgaaatgttgaagtgcaataagaacaggaggactctctgctttctttggaaactattaaccagtaaatgaaaatttagttgaaaactagtagttaataattgccattttctaacatgaaaggattttatccctcatgtgttttgttaaacattgtaaaagtgtcaaaattagctgaactctcatgtatttgtatttaatataatctgtttagatgatctggatatgaaatgtgataggaatgatggttgtagcttagagagaaagagagagagattgagaccctctctgaatatttggtttctggatttaatcaccaatgcacttattttattactcttggcttttgtagtctgaggactttgttttcttcttttgcttaattttcttaacctgaaatgtgacttggcaaaattaaggacagaggtgtatcaaattctttgctagtctctatttttttttttgtgaagaagagatttgtattactacgttttatttataatctttagaagagctataatagaaatgggttcatagatctgtaaaaatcaaaatcactcttaaaaaatccctcaagctgtctgtcactaatgggggaaaaaatgtaatccactttggagatttttttttttaatgagacagggtctcactctgttgcccaggctagaatgtagtggtgcgatcatagctcactgaagccttgaactcctgggcttacgcagtcctcctgcttcagccttccaagtagctaggatggtaggcatgcatcaccacacctggctaagtattaaaaaaaatttttgtagagatggaggtcttgctgtgttgccgaggctggtctgaaactcttgggctcaagcggtcttcctgcctcagcctctcaaagcactgggattacaggcatgagccagtgtgcctgacttgagatttttttttttcctgtgttttcacatgtgttgttgtaaggttcatttggttttgttgttattgttgttaataaggacataaaaaaatttgatatgagaattaacgaagaggcactaacataaagataatagaaaagaatatagtggtagcattcaacagtggtgtattgagattgcaattatttcttaaaacttgaaatcatttttgaaatacatatgttagacctatgtctacagaaacaaacatgccagacactgagcttttcttctttctagatgttggtaattagtaagcaaatgctaaaatttaatattagaataaaatgaccagattttttccattgcttaacagagaccaataacaacattgttatgaatataaattttcattatttctgttattgaactaaaatttggttttgataaaatgtctcctaaagtgtcatccaagaatactttattaacttctgtttttaaaaaataagtacagtaatttttttgataacctcaaacttattaagttcacattaaggaaaagtttcttttgagggaaaatagcctattacacatgacatcctttttcttcttatgagagtttcttaaaccttggacttttagaatgtattttcaaatcaataataattgaatcattattcttacattacattgctatgctagacattattactttctaattattatctttaacttttgcaatttatattatcattgtgtttagatgttacattccctactgagaatcataaatcctatccagtggttttaagtgaggcaatttatgtgcgtttagaaagagactcaattttactcatttaaaataaatggagagaaggaaacattaaaaatagtattatcgtactctatttgtagtttgccattttctgtttagtgtattttcgtagatgaaggtttttttttcttttaaaggttgtctatctctaggactatagttttatgagtggaatgtcacataatgcatgataacataacctatatgtaagggttttacaggtaattagagccatacaggccatttgaggggtacaggggagaacctgagcctgaagaatcatgtgtaggaaaaatccttgtaatcttaagactttttttgggtgtttaacttactaaaatgtcttaattattaaactttcttaatgctggacagttaggagaatattaaaaaatataaaattatttttatccaagttttctgttttatccagtaatcagtaatgatctgccttgattcttcaaagtactattgatgaatttcatttgagttgatttagaaacaactttgttgatgaaaagtttgcttatgtatgtattttcaacatttttatgtctatgcacttggtttcagatgagataggaaatggaaataacaaaacactgttagaaaatcttgtttctgtagacggctcaaccttgccagaaaccacgaggcagtggaaatatcacgagaaagcttgttcctacaagactcccagactgattaccagaccaaagaagttcccagaaatttagcttgaagcaatcatttaaaatttaggaggcggatccaatcctgctcggagtcatccattgctaattatagttgcctatgatgtcccagtgattttgttatcagccacacctaagtatatttctgattttttgcatgttccctccaaaatatattcttgctgggcacttaaaatctgtttatttcactgtatgtatattacaccacaatactgttcgcattttgaatctatgcatttttttttctttgcctgatatatcttgttcaaccttgatgagacagatggctttttttcttttaatctagtttcatttgtatcttaaaatttctagtagctggggcactctcctcacccaggtgaggcctgctttgccctacaggtgtgttagatgcatggttgtgtgtacacatctttgaaatacatgaggctgctgccttttagaaaagttactgtttttgcttttttttaaataaatattttggccagcctcagaaatttagtaatggctttgaacacttggaattagcatgataaagccagagtttattatatactgttgtgatttaaatcacacactggttattttggggagttagagcaatctacttgacacagacaggtcttccctggcggaggcttgcccctgcatgttctggatagatggctttgatgttgggtgaacatcacaacttgaactgctgtgtttacactgtaagaatgcttgctgaatctctcactgcatctctcacataattccaacttcactttagttctgaatacatgaacagtaaagggggcagtttgcttttaaattttgcttgtcagttaggcactttaagagtcttatttctttatgtgatttcctgtaagagctcatatatggggattgttattgagtaattttgaacacaaaattaattctataccctttgatgtggctaataaaagccataagggtatggtaggaaaagaagataagaagatagagaaaaaaaaattgcctctttctatatggcaagaagaagaaaaaaaaaattaagagcagttgtctttgaaccacagcagggtttactcttaagggtcttctagcttgtttttcccattagctaggaaagcactatgtgagctttaaaaaaaaaatacatatatatatatatttaaatcatggaataatataggacaaatgatttaaattgaatctagattttgcatgaacactcttctagtttattggttaaataaatgctgtagtttcaaataacatcccacctgtttgccttgtttgaggatctggtgagatgtagaattccagtagcttggctaaaaaaggaagaaataaaagatagaataacctggaagttctccacttcccttcaggtattttcttgttgttctttagatttggaatctgttactggattcttctttcatccatgcttcatggcatatagatatgtaggcattatacaaaaagcttatctagctgggtgtggcggctcacacctgtaatcctagcactttgggaggccgaggtaggaggatcgcatgagctcaggagttcaagaccaccctaggcaacatagtgagaccttatctctacaaaaaattaaaaaattagctgggtgtggttgcctgctcttatagtcccagctacttgggaggctgaggtgagaggatcgcttgagtccaggagtttgaagctgcagtgagctgtgattgtgccactgcactccagtttgggtgacagagcaagaccctgtctccaaaaaaaaaagaaagtcttcacctaaaaacttgcatcttctagaaccatgaactatggatggtcagaccttcttatttttatgttagcagatttttttttctgtagataatttttcagcattatgattatatgaccaacatgcgaatgtaatttcacattttagcctttgagtgtctgctggttcactcatcttaacagtctccatattctaaaattctggagtagtccaaggaacattcctaagattattttgccatatgctttgtgcagattttgagtctttttcaatcttaagtttaaattgtttccagtttctgaatattaataaaacaaacaaaccaaccctcttaatgtatcccctgttctacacattcccttactttttgggaactcttttgtcccctgccctcaccaccatcctaccctttgccatatggagtgtgggatgtattgtttgttaggttttaaataagcaaatttgccttctctgtgttgaagaaacctttacttttaaaaactgattatggcctctaggcaccaaatcttaaacatttctgtagcttatctgttgagtttattatagatcgtatctagaaatttatttagcttgtttgagttgccaacaaaagttggccaagaaatctgtataatagaattgtctgtccaattttgaaatatgacttctaattatatcttttgcatacacacaaaaatctgcagtattaatttgagctctgtcctaatcacaattattttttgttactttccagtaaaatagctttttcttgtaaatttttgacataaacaccagaccacatttattaaaatgaaaaaatacttgctgttatcaaggtattcaaaagtattataaaatattaaataaagttagagtttgtggcacattgactaacaaattttatctgacagagaccaagaaaaaaatacataaaattataaagtaaataaacaaaatcagtaatttccacaaacaagtatgtttatgcaggagcactgttaacctactagtgttcagagtaatttctgaatcaagataatttctgatggtgcttttaaagagtctagttatcttgtaactaatatgacatgggattaaagttaatctctttttaactacagtgagaaaatttaaaagccttggcttcatagactaaatacctgaacagacaaattgctgaaataatgcagctaagactgcaagagaaactgcaaaagataccccaagttatgtttgttattaagcataggttattttgaaaataggtttccatatggagtatacggtatgtaatttatacagaccacattactaatagattctgtcaagtggcactgaattcaagctacaatgtccataatggaatatgtaaggaaattgctggtgttattgggttggattaaaagaaaaaaaaaaacacctttattagtatgtgttccccctcccctcagtgtacactgcttcttgggctcagactttggggtttaagaatgaggtatttgggccgggcgcggttgttcacgcctgtaatcccagcattttgggaggctgaggcgggtagatcacaaggtcaggagatcgagaccatcctggctaacacaatgaaaccccatctctactaaaaatacaaaaaattagccaggtgtggtggcaggtgcctgtagccccagctactcggaaggctgaggcactagaatggtgtgaatccgggaggcagagcttgcagtgagcagagattgcgccactgcactccagcctgggtgacagaatgagactctgtctcaaaaaaaaaaaaaaaaagatatttgaaggtctaattataggataaatttggtgactaagaggttactcttaataacaataatcatatttggtttacctatttgtcaccagacagtatccagacttcatgtgactaatggtgacaactgtattttgagaaatttggaaaatcacataagctgttggtgatactttcaaatcagaatgttttaaatagcggacaaggtaaagcaagctcagaacttaataatagaggaatagatacagtatattgaaggaaaaaaatacattgacatttgcaaagagaaagatgctgtttctatagcatacctaagtccattgaatttgcacagtggacaaattgcaattggggaatattattcatataaatagtcctgtcagaacacgggatgagtagagtcttgtggaacagtttgtttagagaagtactagttaggaatcacttgtattagctggtaagcatcaagagaaacgcttggatagggtagtttaataaacagtgtcagcacatttacatggattgtgacagttttatcttttgctaaatagcctagagtaagcattattttagcatgttatcaaaaataattataatatatttggcacccactgaaattctgacttacctgttggggtatgtttttggtaattcagaacagattgattgaagaatcttctttaaaagttgcattttagatgttttctttgggtggttcttgtagccatcacagaaataaacataccttagtttgcaaaccgctatttacttggatctgaataggaaacattgtcacgatgttacgatatactgtatttccggataccttaacaattattagataaacacgatgaagatggaaaatattgaagaaataatgatattataaaaacttttgaatggttttagttgaaaacaaaccaagaatatattggtatagacataattgcaaagtagagctaccgcactaccaaaaaaagttatttgaggtagttgctggaagcagaattttcacggttagaaatgcttaaaaagaggctcttttaagtagaaaagaatgtgagactttagttattgtaacagtaggcttcagagtagccataaatgaagtttagctggagtaagactaacagggttttaatctgttgtttttctagttaaggcttattaataacatttatgtatggccttgttcatttgtgcactgggacagaactagaaccttgggctccccattttgttctttggtacagggccatcgtatttcagtaaatagagagttttttctcttcttagacgtctaaacaatggcaataatttataactaactgctcttcgttatgttgcagaggcaaattgcgcagaaaattatggataattttaaaaagatgaaatacaggtggctcatctaaaacagactccaattaaaaccacattgtattaaatagagcctgctttagataggctcctcttcatgctaaatatgaatgaagcaacaattttagatataatagctggtatctggattttaatatgatcagttctcatgcttcggggcccaaatattgccagctggtattaagaaacctaccctcctataaaactcgattatattgttttccctaagagtattgctttaggaattattgagaaagtggtttttacagggtatagacttttgcataaaagttggtgctaaaatttgactcatcaaaatttgcatcacactcttgcatctggaatattaccagatggcgttaaattagaccttgggatgggtgtctcattcagagacatggcagtctgtactcagtgtaatgggtgagcaaagatgtgttctagacctaagtgtatgctgtctgcattatggcttatataaaatggccacatctgttattttatcaagagaataagttttctaagttttggttggtctgatatgctaatatctgcaattagcagagccttgacaaattgttcccttaaattaagagttcatcagtttggcagaatgtgacctgataaaatgatttgggaatatggtgcttttacatacacagattttttttttttcccgttttagtctttcttagccatcagactccagaagatgtacaaggctatgccagtttttttgtttgtgcttttaaagaaattattaccgaatgtgggggatccacggaaagtgaactcctggagggacagaggaggagcaagactgtctgatcctgagatctcagtgcctaaaacatagaaggggttcagtaaatacttgtttgaaataaaaataacgattaaaaaaaaggagggaatagttcctaccatcatatgcaagatgacatgggtagtcctgactcttctggagtaaggagactgagcattctcactgctgaattaggtgaagggaaacttagaatctccttaaaagggacaaacaagaccctacatgattggacctgccccttaccctgtctgccattcttgtcatttcttgcctcagccttattgccccagcaacacagatcagctggtagttctttgccgattttgtgctatttcctatcgtggaacattctcccatgttgttctccctagtccttatcttgcctggttggctactaaacttgtatttaagcttcattatgttctgtctttttttctgaagttgttctaaagccctacctgagttggtgccttcttctgtttctctggaaatctctgtgtgtttctgctcttctgcacaacgtgataaattatttgaattttctccttcactagatggtttttatgtcaagatgcttttccttatatttgttcaaacccaaacattggacacgatggtaggccacggaaatcagttaataagtatttgccaaatgattgttcataccagccctctcagttgcagaatgaaaaactttgaatgcttctttaataataaatcttcttgactattggctgtgattctaagtcccttgttataggagtatggttattaacctagttatttctgccatgtttcaatgtggataagcgtatttaacagattcgctctgttgcattgatcctgtgatggtgttatatactactccagtgccctggactgtgcgctacagggcagcctctagactttgggattaagtaatggtgattcggtgggggtatgggttcttattttatgggagtgttttggcaattaagtgctatttaaaggtattatttttgttagaaagataaggatttagatctgtggttcattaattatgtaaaagttgaattagcaaaggctagtttttggctcaaattatgaaagaatactcttgggaaactgggtatcggggagaggataagtaagtttggttatttgtcttgagattttatagagaacacacacgtaccccataaatgtagttttaaagaattgttcaaagtaaatcaatttttgattttaagaaaagctccaggccggacatggtggctcatgcctataatctcaccaccttgggaagcctaggtgggctgatcacctgagatcaggagttcgagaccagcctgaccaacgtggagaaaccccgtctctactaaaaatacaaaattagctgggcgtggtggcgcatgcctgtaatcccagctactcgagaggctgaggcaggagaatcgcttgaacccgggaggcggaggttgcagtgagccgagatcgcaccgttgccctccagcctgggcaacaagagtgaaactctgtttcaaaaaaagaaacgctccacatttttaaataatacacaggttttgcagtgtaactactggtgaggaccagaaatctagttactagatttcttaaaaataaaatttctcacactgtttaaaaaaaggaaaagaagtacacttatttttcctatgtgtagtttatacatgctaaataaataaagtttagaaaatggaatttaagaagagtaaaagcatcgccaatagttccttccacacaggtgttaatcattttttgttttcacttgtcttttgtattcattttaaaaatagaggaccatattgcgtacactgctttgtaagctgctttttgcttatcaacattttgtaactatctttccatgttattaataactgagttttaatgcttttatcataatttaatcataattttggctcagccatattagctctttcttgatagattttactgtgtaatttaataatccagttttggacttttcccacttagactagtattctttattagatttaacatgaactaagtgctataaatgagtcaatatttttttaaaattatatgtctgtttatcagtgtactgtttcaagtctatgtattagttaagtctgttcttcaggcttgaacataggcatacctccttttattgcacttggctttactgcactctgcagatactgcatttcttttacaaattgaagcagtggcagagtttgaaagaattgactccaattttgaaagaagtcctagtgtggataacatgctatccaaagcatcaatgctacagagaaatcttttctgaatggaagagtcaattgatgcggcaaaccgtctattttatgagtagacaccacagccacccgtcttcatcaaccaccaccctgatcaatcagcagccatcaacatctaggcaagaccctctgccagcaaaaagattacacctcactgaaggctcagacgattgttagcattttttagcaataaagtattttagatgtatgtatgctgttttttttagacataatgctattgcacacttaatagactacagcatcgaataaacaaattttatatgcactgggaaaccaaaaaaaaatcatgtgacttggtttatgtggtggtttggagtggaacctgagttcgtccgatgtttgcctgcagatgctcatcctttactctttccccactactgttggtgctcccagttctgctgtctgcctttatccaattgtaagcctcaatgtgatttctagattcaccctaagtacttgcccttgatcagcccagcactgaactcccccaaacacacaaacattaaagttcatttagaaagagtgaattttaggaagaaaccacagaggccaagatcttctctaattaatgtagtgaatcttctgaatgtagtgagtcttctggccattttttgagtattacattgatagctcattcaaaacgaaaattattcacacaactatggtgtaaataaaaagatgtgatgttaatataatttttggattagattattgccgaatcaagcatctttacaacattatagtttagagtaatgtgtttggctaaattaggcaataaaagtaaacataaaaggtaaaccttcccgattagtccttacatttgacttctctgtatgtgaaacactgacaaaaaccaaaaataatttcactactctgtatttatttttctgattgagactttggaaaagtcaagaatgacaacggtaggtatttcttttttgcagaacaagcctgagatggtacttaggtgcttacatacaagctactgatcacttaatgacattaaaaaaattttaattacttattgccttcagacactacagaagtttaaaaatcctactatttccacttaaatttctagaccaatgctgttggactttctttccctttaacagcaatgattatccagttgaatgttgtttcacagaaaggaaaagtgcatttgtgtaaaaatatctggggcttgccagggaatctttttcagaatgctttgtggttacaaatgaagcttattgttgtataaatggcaagtttaaaatcatagaacttttttgcagtagctcatggcatgagttgataatctgcgaattgctctgcgtgtgtgtttgtgtgtgttcgcatgcatgcctcagcccatctgtaagtagctggatcctgtgccgttcctccccctgtttcccacctcacttatttagatacataaatacgcacacttttacatctaaggcaaaccccaaaagatgcatgtggaaggctggatgtgggagagaggtgttttcctttaattgacctctcacggcgttccacttgataaagtgacaacattttctgaaaacttaaggtttttgaatgtgtggattttctccctaccactgtaatttctgaaactttctctaaacaagatggctggcacattatggggacagagcagagacatagaacagagacaaagccgccctgagaaggcagacacacttatattgcttgtggtttttcagtacagctgctttcagatgagccggcttgttctaagctggtcccactgccaaagcaagactgtcacacagctggtagtacttactgtacttgcgggaaagtatgtgattcattagttggaaccgtatgtttttcaccagttctggtcatgtttttgttaggatgtggtaaaaacacaagcagggggtgaagggacaatggaaacatgtgacttcttaaggattggcctgaacccgttattagctaaattgtacaccgtaaaatgtcctttgtacctcataagacaaatgacttaattttttattcctcagttgaggtcattcagtcataagtggtaaaaattatcaacactgagctctttttctctttttactttctgcaaagtattatgatccgtttaaaccccaaattataatatgaagggaagtcatgcaagtaaaagacattaatttgctgaaaaatgcccatgacgggtgaagaactttaactggagtgaactcttgctactgataaaatatgagtatggtattacagctcataagaaacacttctaataccacagggtgtgaggagaacaataaatgggagtttctttgtctacacatgatcaagcagactcaaattgtatggctggaggattgagagactagtcttttaagtaattttggtgtcattaatgggcttgcatcacagtatctctgtaatgctcaatcctggtattgtgcagaactgctggtgtgagccgcattgaatattggcctgttatcaccaggtttttgagcttgtgaatattttacaactgcacaggccgaaccatattctttggaaaatgaatgccattgctgctgtgttgtgttctccttacataggaatatgctttgacatttgcttgcttctgcttcattctgacactggagttgttttacttttgtccccactcccatagcctgctattgagacaggtggtattttcaaagtctaagtaaaatattggcagattatgcctctaccctcagactctgtttttcaactgttcccttctaaagttctgcaccgttcatgcctcactacatacactccagcagttgctggactctgcagaattagaaccaggtctgtctctgacaattagctcaactggctgcaggataaataaaggaatgcgctcaggggctgtagtctgtgacacagtgtaacagagcgtaaaaaggtgcatctgttccatgccctgattcagtcgcctcactgtcactgggaagttaccgacacggagacatgcccgtgctgtttggtaaacaagcggcaggtattaaattaacagggctgtgagtgtgcaaacgtgctgctttattaaaagccctgctatcttggctcactgctgggtcacaggcagttgctagagcatctagtaagatgactcatggcactgcatacttcaataccctgttctcgcttccttccagaggggaccgttgacatttgagagcctgattacggaaggaaaaaaaggagaaagaaaagagaatacagggtgtgtgtgtgtgtgtgtgtgtttgccttttacgtttcgtaggctaggcaagaaggagatgagggccagcaccccagagccaggttttagtttaaattgggcttctgaatccaatactaaattgcaaccaggtctctgtctttgttgttgtttattttctctgcctttctgtctcaccctcctcatgactgctacttgatttgtggttgaaataatgaggggataactgagagatgaaagttttgctctgtctgcctgcactgggtgggcaccatgcatcttgcaaatgtacttgcaggaaaaaacacttcgacttttattatattctttaagcatttatcgcctttgcatttaatatttttaatgaaaaactcgcattttaaagactttctgctttcattcagcaatgtcatgatttttgaagtttgttttcccttcagcttcaggaatgctttacacagggtcatgtgtggttgccttgttgaattgttcctcacttttgtggtcttatctttgaggagtcctctttagatataccaaggtctgtaggcaaacattacaagacaattttcagtacacatgtctgtgctaaagagactggcatttctgaaggtttcctgctcccctccaagttgtgtttcttttaagggccccaactagctcctcatccattagaagatgatgtaatgctaatggtatctagctccacacagcttggaccaaaaatgattccagttggctgtatttgaatgtgaatgaccagaaggtgctagacattctccactgtaattgcaagtgcttaccttggaaatctcttttggttgtagaggtcctttggtcctcatactagagatcataccgccacacatgcattcctactgtccagacccatctttattgttggctgtctttttatagtgatgtctaggtagaggagtgcgatgcccagggtcggggatagggagggtggagaggaagcagcctttctcattgtttgctcagaaaggaaagtatcccactatctagagagttagtgatgcctcagaatctctttatctttgtaacctcttttctgtatgaagtttaataagccggctgtgcagtttttaaaacgccagtggattccgcttttcacttggaccgccccccgccttttgctctgagcattcactccctgtttccttatttcccccgttctcttttcctttatctcaggggagttccctgagtagcaagactgaaaaagagctgaggtttatgttagaagaaattaaggttaatgatcattggctcattttcatattctgtgggtgtggatggaggagtaatcagtgcaggtggccctgccagttgggagtttttctttgtcatcaagaaaataaggagagtgcagggattgaattaccacaactatttcaggactaaacatatttcatttcccgatcgggtctggtttaaggacgcaaagctgacattaattttatccaaagaaagcacagcattttttttgtttcataatttgactaatgcatagggtagatgcatgttcaaatttaattctagtataatcttacaaataattctctgaaaagcaaaggggttttgattcagtttgacagtttatgtttctgtgtccaattaccacttagttattgaatgttaaaaagctgctttctaaaatgtgcactccgactgcaccaattggcttcccagctgcctgctattacatgcgaggtgctctcttctaactttttaaaggatgtacacagttgaagtagttatgtttagctagcaaaggaagtgggggatttggttaggaagtgcttgctggccttgaaaaactatcatgtgtgcattctcatttcagccacataaagatcattctttaaataaatacttgttggattaaaaaaaccttaaatgctccgataaactagagaaataactttgattttttttaaaaacatgacttccatttggatcaactttttaaagttttcaatatgcttttaataccactgatgtaactttctacaagtgaggtattctgattccatgcttggaaaaagaagatctacaggttgaccagagacaataaaagtcattgaggaagagtgtcaacacttgccatgcatggtaggttttgctttcttagcggaatgcagcagacgactcaagtgacctgatctgtttttaaagcacaaggtttatttggctgttacagtgtgagtataatattaatgatactaatgtaaaattaacttttatgttgtgtgagcagtttttcttgtttccccctttaaaattgcagatatttccttgtgcatacatctggtgttgttgccatagtgaacatttatataactttgtttaagccatgaaaagtttggtataatcgggtagtttggcaagtccacgtgaaggtggttttcggttttcatagccctgtggtatgagtccacatgcagttgaatattcattgtatggccattaatataaatacttcgtctagcttattaataacacatgaagagaccatgcccagacattcaaagggcaagaatgttttagtggtttctggaagctccttgctgtgaagaaataaggcttttaaaaaacattgtagtttagagttttgaagtagcactttaaaatattttaaaatacatttggtatatcttaagaaattcttgactaggctaaaacttaatattgaacgaagtgatcttttgagatcaatatgatttccaagtttgacatttaagcaaatcatgttctctgttttaagaaacattaaacaaggagacaaaaatacacaatacatcagtttctaaggtaacattatttcctaccttctgctttgctttttactgaatcctttttacctttcctgctactgatagatctcaaaactggcctcacggggttttcccaaaggcttttggaaagatccatttactttatgacccacatacatctggtattagagcaactatgaattaatccagcctcacttcagtgtttatctgttatgcattaggaatatttaaaaagcaaataatttaaactaatgtttttcttgcatgtaagttagatccttaaaatcagctacacatcatattaacttgaaatttttaaatagtcgactgaattgctttacaaagtgtagttgtttaagccattctgatggttttctctgcaggctccttagctttgacaatactgttctactccttcacttgcatctacttgttagtgccttttactttggtcttttcgtttctttagaaagttcttccttttggatacatagaatataacgtcatttattgatctctcttttctgctacctttgtattagaattttaaacacgtcatgacaggaaataattcagtctggtacaatatgccctctctctcctagtttttaagtcctgagtcttgtatgccgcactttcaatctctggtggctaacctgactactttgtgtctcgtttactggaatacgtccataaagcaaggatacatgtgtgtcttacatgtccaacaacgtattccaacaaaggctttcagtgagccaggatgtgtggcttagtttcaccatcattttggtaaaaatacatgtattaaacagatactgaatttctgacttgcatttaatcttctcctcctgttttatgttttctttctttgattcagacagcaaactgattcaaatcttcagtataacctataaaaccaaaggtttattaatattagggtacccagagaataaagttgttcatcgttttttaacagtagagaaataaaaataataaggtttttttagtatataattaagcacttaaattgtcacctgaaattgttgttctttacatgcgtttcccttagccctttgtaattacctaacactgccagttagcgccagttgtgggagcaacaggcttctaaaaataccctcctcctggcctggccacccacctaagaaccatgtgaagaggtgttttgtgaattatcagaaagttaggtataactgatgcaatctgtgcagctatttctgtcaaaaattgtgcctccaagagggatcagctacattatatcttgtaatttcagatacactttcttggatttagtggaaaaaccttctctgaggctttggtaaccttctgaccaaatggattgcaatcaagtgtacctgtgatagtgagcttgaattcacaaaacaagcaactcgattcattgctttgttaatccacatccacttaaggcatagatattctttatttgatacgtcatcttggtttattcatcatgattagtaagtttgtctacattaaaaatattacacaaatcctgaaaaattttagtctaaaagtcatcagagggagctataggttcttaaattaattgactaatgaataaaacctattttcctattgggtgttcttcactgcttcttttagagtgggcgcagatgaaaatgaatcatggagtttaggaatgaaagtgtgaaaagtaactagataaaattttataatttggggagctataaaatttagaatccatttccttgattttcatccctctcatttggaaatgatgaagctcaggaggttaagaagaccacggtcatcacaaccaacaagagattgaaatggacaagaatcctagtgtccagaccagtactgtgcaatagaaataattctgcaagccacatatgcaatttaaaattttctagtagccacactacaaaagtaaaaagaaacaggtgaaattgattttaataatgtatttcatttgacccagtatatcaaaaattatgatttccatgtataataaatataaaaaatatataatcaatatgagtgtttatcgagacattttcttttcttttttcattctgagccttcaaaattcagtgtattttacactttcagcacatctcaacttggactagccacatttcacgtggtcaatacccacatgtggctagtggctaccatattggatggcttaggtctagacaccagtccaattttctttccaccacagcagtgtagtagcttttaaagggttgacttggattttcaaagtcttattttggttaatttaggagacctggtgtctttgatatacaagtgaaaaagtaactgaaaccttatataagtcgttataatagaagcacattgctctagaatcatctttctcattaacatttttgattccttggcaaatgcttagtaatacttcaagtaaatattttcaagttacttgtagacttttttccttcgtcactttactccctgtgaagccatactgtctcagttttgctaaccacagacacattacaggcagtgttgtgggagaagaaaaagtttccctctgtttctccttttggaggttgaaggcagtataccctggtgctgccctggactgaggctgtccaccatctgtgtaaggaattcacaatcccagacaaaagaaattggcaaagtcttccctctgtctgctctccagatcctcaagatagccataaaacacctggacaaaatcagcaggtgatggcaagggaaaaagaatgatcagtcacaggcgttgttgaatcctttgaacattacttacggcctggacattgctgtcaccaggctcaatttgatcttgggtgagttttctggaagagctttattccctggctctgtgacaacagcggaaccagataacattgtggatagaggagagaagtggaaagtcgaggtttccctgccttaaggtatagcagttccaggtggtgttacctctgtgtgtgtaagaacatcctacagaaataagtcatatcaccagatgcataaagtgtgctatttagatcagtgttcttactgtaatcctgctcaaggagtttaaatattcactcatctacttatagtttataaattgttttcagaatgatcagcattgttcatatgctgaattttaaaatgtagtttaaaatctgttttctgcacttaacactgaaaaaagggagttggcactatggtatttataggcttttacaaatcttttcttatggtggctctacataagaaactttgctacatactcattttgtgtcacatggtttgcttccatatcttttgttttgatgctgtatgtagaagtttcagtagctactaagtcatcatttgggttgtctgaaatttttataatgatatcagatggtggcagaattgcatatcatgaagtctggtagtgaaggggcacatttttaatggatcaggaatttagccatgaagaaataacacttttgccagtaaaagctccgagcaaagtccgttagctgttgcctctttgtcagtcagtaagagagtttaatacagtggtatttagctttctttgctgctgccagttttaagggtcatattttagctctgatctttatttccagtgagagggctaaaccaaagcagaagcagcactatttaactcggaattcagaatgattttttctctccctttggctctgtctacaaatgtagccctttttcatatcaatggcgtcaagcttcattgaatttagctctgtcttgttaagtacattaatgctgtgttctgtcattcattacatgagaattagttgtctattacaaagtgggggtttttgtttggagcctgatcttcacgggaagaaggccatacgtggcttaatttcctgagtgcattgaatgctggacttatttttctgtgacttgtatgtccactgaaagcatcatgcaaaatgttgattctaccgttgggaggcccactgtattttaagcaaggaaacttaaaagagaagaacacttaccacctttcttttttaaaatcccctttcccccatgcattttgtcacatttttcagtgatctatacagtgcccttagagtgtgttacagaaagtgttaatatcttagagcagcagtaataataatccttttactcagggtaatcatgtgctaatcctctggtaagtcaaaagtattagatcatttgaaattcattgtgtcagctcagttgaaataactggtatggtgctataaacatttagagaaagggagtctttgaacccaaataataatgtcaaatagtttgttagtgttacatgttcatgtttaagggtttcataagctcaacccatggacaagagcatttcagtttacatcagtgtgtaatatattattttaactgaaggtttatttttattttgttatttggggaaagtttcttttcctctggcacttgtggactggatttttatggtacagttttcactctgcaatcacaggaagcctgctgtgccagaagggtgctttttggtattttttttttgttttttgtttttaaagaaaactatttttgtttttctaaagcattatgttgggtttgaattttctccttgctcccttctttcgtattcttgagaaaaacattgatggtgtacatatttatttttctgtgaatattttaaccaggaattttggcttcatgtttcccttttcctcctgaacagagtcacctcttccttggaatttttataattttcttgaattattctctttccctctctcactctaagtccccaggggatagagagcccttagattcttggttttagtgatctttgcacccagcataccttaggtgttcaataaagaatgctttgaattgcttcacttatagaaatgctggtaaatttggtgacttagctaaagttgttcccatgtcagaaaatgaatatttttggtgacaaatcattttcatttcttctttcctgaaagtcgtttgagttttagaagggcgccttttcttagagcttcaggactgtttgagctgcaactgttgtcctccacctttatgaaaccactcagctgttgacaaagccggtgttagagcttcagagagcaccagcacaattaattggttttctgagaatgcataacttaacttaagtaattgtgcaatcaaggctcatgtggaaaggatgagtatctgtcctttctggacctcttgttatcactccttgtttccacctgatctttgattcatagttttggagaacttgtagattcttttatcctagggtatattaagtactgtaatgtgaagtcctactcctcttttttgaagatgaaatttacagatcttgctgctgattgcattctgtaaataaagggagagctctgaacatgatgtttgatgttgtgtccctagtccgtggccatgctcgatatagctttcttcctcctggcgtcctcccgtgaacagattctggtaatgagaaggttcatcatctaaaaagcagtccacaggatagctttctctatgctgttatagaatgaactgaaatctacgtagaatagctctagagctaaaattgggtagagagaagaggtgttaaatgcaacctgaacattttttttcagggataacccagctcagagaataaggtgtccagatgatctggtttaagtcacagagccagtgtagccaaccagtccccaaggcactggcctcactgagagggtagctggcgttccattgggtatgggatcagggattattgatggcattgttacaggtctgtcagtgagggcacgtagaataggtagccccgaaagttgcttttagtcaccgtaaagtggcgctccattttagagttcagtccaggcatggctttactgccattgctgggaaagtacagcatgtcacagtggcagagaacatggactgtggagccaggctgcttaggtttgaatcctgtttccaccacttgtactgtctctgtgatactggacaggtttctgaagtgtctgggcacccaagttcatcatcagtgaaatgggataatacctacttcctgcatagctgaagttaattgtgaggatttaatgaatgtatggtgcctagaacagtgcctgaaacataataaatgctgcatacatgtttatgtagtaaaataaaactgggtgctgagagctgctgatgcttcagaaaaccattagtgaaacctaacccctggaacctgacccttcattaaggccccaaggttttactaaactttgtgcctgccacaaaaaccatacttatatgtgccttgtatagaagctcctatagataatcgtggtttttttttttttttttcctccatctgtacgtaaaatttggaggagctggctctacagggctttgtggggattctcttgggtgacagtgtagctgaggaaactctactttgaactaaaaatagggccattttcataattcttttcatattccgctttgttttctttgggtgatacattctttatcaggtataatttgtcatagaatgatgttttcaattgtattttttcgtaaccaaagtgattaattttcaatttacatgtggctaagaagatatatctgataatcaagtttagttcaaaagtaggtttttttgtttgtttgtttgttctataagaagtacctcattttgattgcagggccacggttaaagtggacttgacagtaaactgaaatttacgtttatcgatgatgatcatgaccccatatcaatttctgtgttctcaaatgcattatatggttgtctgaatagttactccagattgccaacactgtgatttaagcctttcacaaattacctgttgtaattcacaaaactgggtttcatattatctgtggcaactattttttttaaagattcctcaaagatgtaataatacttgcacaagtggtggcaactaggacagaatggttcaaaacaagaggaaagaacatactatgaaatgctatagagagccacctacgaaattcccacgtgtcagtagaacttccttccttccttcctttcttccttccttccttccttccttccttccctccttcctcccctcccctcccatccctgtcttcctgccctccttcctttccccctttcttcctttctttcattcattaatttttaatttttttttttttttgagagaggatctcactctgttgcccaggctggagtgaagtgccacaatctcagctccctgtagccttgatctcctgggctcaagtagagattctcctgcctcagcctcccaagttgctgagaccatggggctggctaatttaaaaaattttttttgtagagacagggtcttgcaatattgcccacactggtcttgaactcctgggctcaagtgatccacctgcctgggcttcccaaagtgctgggattacaggtgtgagctaccatgtctggcctcttttattttattttattttgcgagacagggtctctctccgtcacccaggctggagtgcagtggtgtgatcatggctcactgcagtctcaacatccgaggctcaagcaatcctgctgcctcagcctcccaaggagctgggactataggtatgcactaccaggcccacctaatttatttattttttattatgtagagacagtgtcttactttgttgcccaggctgatctccaactcctggactcaaatgatcctcccaccccagcctcccaaagtgctgagattataggtgtgagctaccatgcctggcccggaacattttcaatatggttatggaaacattatcaactggacacagttgcttgatttctcagcttaattggagttatcttgatgtaatggaattgaacaaatgtgaccattgagctctcagacttggttttgaattccactttttccattgaccagctatgaggccttagtcaagttccttaatctccttgacccttagtctccttatctgtaaaatggcgatataatagtaccaatcatgctcaattgtcatgaaaattaaattaattcatgcatgtgaagtatttacattatagaggaagaaaaatttattttccttccactcgtctaagttcttggctgctaactctgtaacaaaagacaaattaacaaagaaaagcatacaaatttatttaatataaattttatgtgacacatttccttcataaggaaatgaagacttgaggaaacaattaaagctgaatgtttttataggttcgatgaagaatggacagtcctggaaaaatgtgataagacaaaaaagagtatgtgctaagagtagtaaaccgaaggaaacgtagcaaggccttcttatttagattccttttgatgtccttccattttcagatatacagttgcttttttcctctgggttttgggaagggcacctctcacatgacgatcttatggcctgcttctggggaaaaggatggggaaatgtcagagagtccttgcatatatcatctctcaaaactcttaatcttaaatattcagtatgtcaaggtgccatattttggggtagcatgtcctgagctccatcaacattaatgtaaaaatatttagcctaatgcctggcacatatcaagagcttaagaaatgctgactctaaaattatgacatctaggaagatgtggggcagaattgtaaacttacctgctaaattacctatgagctgcccaccattcgttaattatggcaataataatgggtttatcatgctgtatcctcactcttgcaagcagtgttccttgtgcttagcagtaaatgttgcctaatttggggcatgctggtgtgtctgcagactgttcttgtatgtggaaaggtaactggcctgcttggcttttttttttttttttttttttttttttttttttttttttttttttaaagagacagagtctcactctgtcatccaagctggaatacagtggcccgatgacagctaactgcagccttgacctccagagatcaagtaatctttccacctcgacttcccaagtagttggggccacaggcatgtgccaccacacccagctattttatttttatttttatttttttgtagagacagggcttccctgtgttgccaaggctggtcttgaattcctgagctcaagggatcctcctgcctcagcctctcaaagtgctggaattacaggcatgagccaccactcctggccattttttttaacttcatgcatgtagctcttccatatcaccttactgtataaaagggaacaataccccagaaacctttcttttaaatagtacctggaaactctaaccttgctttctttttatttagagaaaaggtgcattttaccatgatagtgaaggcatttacatggattagatggagttttttggatttttttttttttcaagaaaaggtttttccaagtggttttgttggcttttaaaacaaaagcaatcacagtaaactgaatctgtttctcttttgaagcatacatgtgttgattgctaactctgtgctaggtactgtcttggattttggaggctgtgatgagtaagacccccatccttgctaataaggtctttatgacagtaatattatagaaagatttctaagttttggccaatggccaactatttctactagaagttcttccgtagatctcagggtgtacccctacgtctgttgcttttgtattttttcttcaggcttgtgacagtgaaatttaacatttttgggtttcaatcccaagcgttaatttctggttaatttcattcccaagtgttaatatataggacatgctgtaatttggttttgagccttgtttcattaggtttggctccaaggacacacaaaccagaaaacaacttattttcattcctttcttttgtggctgttatccatatggtactgctcatctccctcttgtgactgttacctttcttttgtaatcgagttgtctcatgatgtcatcgaggcaattaattgaaaatacactgcctgtctggaatcagagacaactcagaaaattttgcagtcttccatgacatgcccagtgacagctgtgcttgtcactatttcttctgggaaatcccagggaattgtcatagtctgctgtcctggttacccaggatttctcacttaaagctgaattggtggttggattcaaggatgcaggggcgcccaaattatggtaagaggtctaagaggctcctccttacatttacctgttgtcactcaggaaaagtagcagggggatcttcttgcgcacaatctcagtaattgaaaaatgaaggtagtagctgatctccttttcagaaaaggtacaggtgttggcgtttgttataaatacctattctgagaagcctgcacagcagtaatggggaatactccataacctgctgtccccagtgattttcaataacatgtggcatttggggccacctttccttttgactttgtcttttacatttaaaatttattaaagcaacatttttctgggttgcaagcacaaaatggatttttttcctagaagttttgcatatttcttgttatttctttaacacagtacgttttccttcccttgtgtgatctgcattttaaaattggaaaagtacactgggtatttgcttattcaaactggcacaataggcatacaggctctaataattagtcatatgcttggaaattgtcagtgttccccatggttcacaaatttaaaataaaactcactgctatcttttattttgatccagttgatttttcagactacctttctaaccttatggtcctaggtattctccttgctataactcatatgttctttgaacaagccccatgctgctttacctccgtaccattggcagtacttgtccatcttcttggatgatcttctttccccatcttggcttgttgaaatcacttaaataggtttgtcataagtgatgatggtccagcactgagctaggagatatgtgtgggtgccaagtaaaacaagacatggtctctgaccttgaggacctttgagtccagtgcctcttgaaagcctatccatcttccaaaccacttccttcactaagctttttctcattacctcaatagaagtagtctgtctcccctgaaccctaaagcattttgtttatgcctgtcttgtcacattgatcacattccactttatagtatagttatttgtggtcaggtttatctccctactcagttgtaaattcctcaaggacatatttatgtttacatgtcagggtttagaattctgttttctacatagtaggtatttgataaatatttattgaattgatggggccacaagaataaaaatccatgctaagaattggtgaggggatcttgtcatataatattttgtatttcttattcagtacagttaagggaatttaattttcaaattctactctaataaaaggatggaaaatggaaatatgaatgcctagttctctaagtttggtatgagaaagtggctggggaaggggtgggtgtgtgagactgtttcatgtgtacagtattgtatcatgaggcagatacttaatttcaggaaacagcctaatgaatatgaacacttggaaaattagttgcccattctattaattgtttatttgtgaatgaaaggggctagtcaggctggaggattgcatggtttctggaagtcggtatactaaactatctccagatgtggggagaaagaaagacgtccacattttattgcatataacactttgttgcacaattcacaatttgagcttagaggttttttttttttgcttctgttttctagttatttattttagtgttagatctctgttctctcttctacctcttacaaattaactaatagaataatttaaaggaaacatttagtaatgtgcttttattgaagttaggtggtctagttagaagaaagagactaggttatttttatatggaggaatatttgttcttcctcgagttatttattttgtttggagacatttatatgataaatttacttgtatatgaattttcaaaaattttgttaaatcaagaattgttcctttactctgcaggtagaatattttaaaattgagcttaatcattattccagagaatttgataaacacatttagtgaaacttggatggcatagccttacaagctggtcttacaagttattattttcatggctgaatgctaacagactgcatgtcttgctttatcagagtgtaaagtgagaccttttttttaccttgaatttttttgttgttgttctttatgcaatcatttaaacaatagctctggcatcacttgattgtgctattagcctcaccttttcagcaacaagtattctaaattcctatcttgggagctgcttgggaacctggatttttgtatgataaccagtcaaaaaataacataagattgatgtccagggttggatttttatgtgtcatttaaaaatggcatttgtgccacagttcactttacagccgttttccagataattcaaaatactagaaaaatccatctggtcctttagaaaactatcctggagcccttcccttcatgtgcaggttatagaaaaaactctggctggatggatgctttggtgactaatttaaagtatctggcaggacgattgatagcgcctttcctttgtgttgtaacaaatatatttcggctgcagtttattaacataattcagcacaaccacagacatattgtacatattaaagcatagaattagaaccattttttgcacatcacagtcttctcttgcttgtactttttttttgacaaggatctggataattgcttcaacaaatgaactgctgtgttcagtctgtttctataatttcataaattgttttcatgctaaaaccaagcaagctttcactgagttaatataaagaaccgcagtgtaattacaggagctgtattattaaaaagtatgacagcagtggcagcctaagtgacagctactttctccttgctttatcatgacaaattaaaaaactcttttaagtgccagggagcaacagaatttgctatatacacgtcatcttgaaaatgggtatgcactcatgactaattattttaagtgtgtgtatgatgttgtacccctggaaagactccatgtacctaatgatcttctgagtgttgcgtttcttcaactgtgaagcaaggaaaggtgaaataccatgtatgagaatgagagttaagttaccacagggtagatgacattttaaaagcagataggagttttttaagatctactttgtattttcttcactgattgcgtttaaattctgttgggccaactgatcagagactacctatctctgtttcaattcatagacccttataaccctgataaattatagtaatttaaatattttgtcagtttatcattccttcaaacttgtatctgtagtctgctttcttgtcatacatacattgttgggaacctcggattccttctgggggtatttaaggaaagatgttactcactggccgttcctttcaagttttactgaatttaattatagtggtgcatctggcaggcatgaaaaccattagatgagcaaagggggctcccaaatgccactctatgagcataatttaaaatgcttcggattcagcaatcctccttcagttgcgttattaggtacattgccttgtactgttatccttctggttgtggttacatggtgcgcccagtttttgccaccccttttcccttccctcatcactgcattgtgtgatatctatattatgttgctgggcctttcctttagaatttgtggaaataatggtatatttatccataatatggatgagatacaaatgatttggtattaagggacataagtgatttgccttcttaagagcttgtgattatcagacagaagatggcagagaagaataagagcaaaacaaagccaaacctgtttcttctattgtcaattcagtcaaaatggaggatactaagagacaggagtcctgagaggagggggtaccaagggaaaggtaagaagggcaggtaagggattcaagacctactggagacaagggggaagagcaacagttttgtcaaaaagaaaaagatcagtgatctttctggaagtccagcagagaagacctttcttgagattagtttaaattaagaactagaatagaaatatgtcccatagataaattccataaagcacactcctgggattctgctgtccaggtacctgaatagtttgtagccatcttctacatacctttattacctgtaacataaggaagcataggagatacaaggatgaagttcggtcttctccttagcaggctggacacagttttagcagttatttctatatgctcatatttagcttgttttccagctgagctccaatttttgttgtcctggagcagctcaagctttcacctttgggcctgtagattcctatctcagttcacctccatgaagcaagactaggttggtgcgccttctcttcatatcataacaccctatggtttccccccctctattggaaattgcttatttactttccttgcagctcaagcttcttgaggatactgtgggttttatactatgtatacaatccccagcacagagtaggcattcacaaaatacttgttgtagtaatgatttcatgtctgagacttttgttataaaagctctctgagcctttgaaaagtggctccgaaaggtcccctggggtgcacttttctctaggcaatcagtgatcagagttagccaagcctgctgtatcccctttcattcaaacagcccatgttgcgcatctttcacaaggctgtgttctaggtgctaaagaaacacagaaaaatcccaagatcccttcctgtacaggagactgaacttaggttggcaaggtatgatgtttaggaaccttaagtacataataaaaacattataaaatatggaaacctagagctttgaagaaatgttgagcatattgaaacttatgcatgtaatggaagaggaagtggagtttgacttttgcctatttcaagtttgcatgcttctgccgggctttggaaacagtacctctatttttcagatctcactgactccctgtcaggttatcttttcatgacatcaacttatctattaagtaattagggcatattttaacatgtaaagtgtatgtctgggagccatatattttggaaatgtacagtgtgcacctgtggtcccaggtacttgggaggctgaggcaggaagatcccttgagcccaggagttcaaggctgcagtgagctatgatcttgccactgagtccagcctgagtgacacaacaagagtctatctctttaaaacaaaatttaaaaaattgattatttttaaatgcttattttgtctaagaattaataatcataataaactttttttttcttttagttttaaggagcagggagtttaatagacaagaaagaagggggaagaaagaaaaaagaagctcccctgtacagagacagagggagggggaagaaacgtttttatttaccatttactctgtgtctatcactgtgcttagctttttaagcaaaatatttctaatgtgtacaaaattgctgtgtgaaaagtagtaccattcagttgttacaagtgaggaattggggtctcagggaaaataaataacttaaaaataggaagtaggaagtacccctaaggaatctttttctgctcatggaaagtagaggataagggtagatttagttaatcacaagctttctactctttttgagcctgccctcccctgacgtaaatttgatgtctcaaatttcttgaaggctttatttaaacagtgctttgtggtcccttctggcagtgtgactgatgcttgtaccatgggggtttttggatacctggaactccatattggtcataagagtaaattggggatcctgggaaccctgtcttactctttaaaaactgtgttcacacattaatgtttcaggagagtcaaatttattttgcctgttttgtgtttttaaaaaagagatcaattttgttaatctataagttaggtcactagagttggaactacagtattaaggggccttccatctggaagtcttaactgcctagacagggtaggaaaacatcaccttagatttcaaaaagacttaaaatgaacctcatctgaaaatgaaagcatccgtgtagcatatacaaatacattagcacactatgctatgttcaagtagagttgttaatttctctgtgtattattttaaacaagattggtaaagtaggaaaaccaaaactttttttgctttgaaaatttattctgtaagaatataataaaattgtttacttaccctaaagtgtagccgttatcaaaactctttcctttagacgtgtttagtttaaccacctgcctaaaggaccactgagtttgaattgttacagccaagtttacaagtgtggacttggtcctgtgtttcttttaaatgccacttcataagaccacccctttttttctacattccctaattattttctccgtctctccttgttgtctgtttttttctttctctgaggttttgcattacttttatcaaaacgaatcccctttttaaaactggataccacagcgcactgtggctcacgcactttgggaggccaagacagaatgattgcctgagcacaggagtttgagatcagcctgggcaacatggtgagactctgtttctataaattttttttttttttaaagtcagccaagtgtggtggcacactcctgtggttccagctacttgggaggctgagacaggaagatcgcccgagcccaggaggttgaggctgcagtgagctgtggtcacaccactgcactccagcctgggtgacagagtgagaccctgcctcaataaatgtgttagtccgtttagaagcaagtcacacattatgtggatggccgcaggccaaaggagcttgtgcagataaattcctgtttttaaaaaccatcagatcgccggccaggcgtggtggctcacacctctaatcccagcacgttgggaggcccaggtgagtggatcacctgaagtcaggtgtttgagaccagcctggccaacgtggcgaaacctcgtctctgctaaaaatacaaaagttagctgggcatggtggcgggagcctataatcccagctactcgggaggctgaggctggagaattgcttgaggctggggctggagaattgcttgaacgttgtggggtggaggttgcagtgagctgagattgcgccacttcactccagcctgggtgaaagagtgaaactccgtccccctacccacaaaaaaaaaaaagctatcagatcttgtgagacccattcactgtcaagagaatagcatgggaaagacctgccctgatgattcagccatctcccatgggtctgtcccacaacatgtgggaattatgggagctacaagatgagatttggttggggacacagagccaaaccatataaataaattaataaataaaattgaatgcctatatatttctcccctctaatccattcctcagagtctctgacagagtgaacttttttctttattattaacttttaaagctaatcctttaaaaaatattttttctattctctcaagtttttgtcttttatacatgtttgaattaagtcattgttctaaatatacatgtaagctggtttataaatactataattacttctcttacttaggactcaaatgttgctcataattgaaattgtaagcccttattttctgttctagcagcaggcactctaaatggcttgtttaaaaaaagttcttgactgggcgccatgggtcacgcctgtaatcccagcactttgggaggccaaggtgagtgggtcacttgaggccaggggtttgaaaaggttagccaggcatggtggtgtgcacctgtagtcccagctacttgggaggctgaggtgggaggatcacctgagcctgggagggttaaggttacagtgaaccgtggttgtgccactatgctccagcctgggtgacagaacgggaccatgtctcaaaaaaaaaaaaaaaaaaaaaagaattcttgaaaggttggactctttattagttatcactaattatatcacagactctgaactctaagaatgcttgttttcatggctctggtctctgttgtgctgtaataaacttccatttcatattttctgaagttgtcactttgagttctttctttggcaataagaaaagcttccattcagtccatcttaaatgtggaaaacagttttatgtagcacttgttacttaacagtagtcatgggacttaaagaaaaatgttgaagcttagaggtggtaaagcatagtggtttagagagtaggtagtgaagttgatcggaagtcctggctctgccttggcaaaggtggttaatgtctgtgctttgttgttgtttttacctgtaaaattgagataatgatagcgtgataccctcctaagagggaaaagtcaggataagctgagtttgtccattcagagtgtttagaacactgcttgatagtaagtgcgtaagaagcgttgccagtatttttaaacttaactttgcagataatatatgaaatatgcaaataagtagaaatatatacttgaaaacatgaaatctttaggataatttcctcttttcattctctactaatttattgttggtgaattagatagaggtcacaatctagtcatgtgttttacagaaagtagttacaatgttgtgttccttttgaaatactgacttattctttggcgtgtatgaggggacatcacatgaagtcattgttgaaaaagatgtgtccattaagaaagttggtgctctatttgtgtaattcccgagagtggagggatttgtttggtacagtagccttattagctttactaaaacaaacacacaaaaacagactgacacccacaagtatttttgtcttgttttacaaggtctggtttctttattgaagtaaaattcacatagcataaaaattaatcatttttaaccttttcttttcttttcttttttcttgagttggaatctctctctgttgcccaggctggagtgtagtgacgcgatctcggctcactgcaacctcatctcctgggttcaagtgattcttctgcctcagcctccaagtagctgggattacgggcgcccaccaccacgcccggctaattgtgtttttttgtattttttagtagagctgcggttttgccatgttggccaggctggtctcaaactcctggcctcaagtgatccacccagctcagtgtccctaagtgctggggttacaggcatgagccaccgtgcccagcccattttaaccattttaaagtatataattcagtggcttttagcgtaggtttagcatagttttgtagccatctgtctctcaagatctttctaattgaaaaggatttatatttaaagttttatgagttttgctttgcatttaaattatgtcatgcagcttttctaaaataaacatagcagttctgtgtttcacaaaattaaacaaaagttggcatttaattaatatgaatggggcattgcttctcttttataaagtgttttttaaaaaatctctcttacagagagagagagaaagaggttctaattaagatgggtcccagatgtttgctttgtattggtttgtattgtacttctgttgactaagcaggtagttgttagtggttttaaaattgtgaactaattagaacaatacgaagagaattgaacatctatcttgccaacatccagatcaaataaaatttagacttttattattatttaggatgttatttagtatacaaactcatgtaaagttttatttactagagtttacattcttttgtatctttttgatttgaggaaagaaaaaaatggacaatttatatgaaatttctaacattttaagcagtactgtgacagaatgtttttttataaaatacctaatttttaagagaatatttgagagaggtttgaaaatatacctaaacagaaaaaaaattaaagaaaagtgtatatttttctgggcattaataaaatcagccaaggttatgagcagaaatactaacagcaggtttgggatgttgatagtgaagcttacctaaaaatcttaagttaaaagttttaagttattgccagatttcatggcacttgcaacctcctttttagttttgcctaaagtgaagcatcttagaccagaaaggatgctctaattgttgagtctttattatggcatttgagagctgcttattgctgataaatagtgtttatgtactatatgtttagcgtctcaaaattattttcttcaatggagcaattttgcacacagacaaaaaatttgtgacttttggtgtgtgatgttagggtgaacctgattgttaaaagtttaacaaatatttgcattggtagcagttaatgtgtattaaatgtttatttttaaaatcatatgttttaaataatatgaaaaatgtaattttaactggttacaagttttcttgtataacattagcattctacctgacactgtgtagaagtaaattttgattttagctctgtaaccacataaatacaatgctggattaaagcctttggccctgacttatctgctagtgtgtgaacatttctgtttgcagtgcctgacttcattgcttcctggaccaaggaaggattacttttgcttcttgatagatttaacctaatctattactggtttgacaattggaggcataaagggtaaccatcagcatcttttcgaagcatgtaatgctacttggagaacaatattccagtaaggaaatttcttgttttcggaaattcccaaaaattcagtggataactcatagaatgcttttaatatatacagtaagatggcatcttctatttctaaagtatttagtttatcattttattagtcaaggaatactatagaaaagagcagtagatgaaatgagggtttggcagcatcaaatgataaaaatccatgttcctggatgcagttaaaacagaaatgtaaaaatgttcccatctgtctaagccatcagtttctgatacagtccctggaggaagtggctgaaaagtcatttccacctaatgggttgttaggttgcttctgtacagtaagttggtggttgcagcccacttcctctaagacaaaggtccatgtctccaaaaccccatcacaactgacactaattggcattgctctcggcccagggctgtgaaagcgggcctgagtgggcatagagtggggagcactgagggggtatgtggcaccactgaaaagacattgtagattttcctagtataccacatttagatttttgttttctgacccctgttcatgcaatttatatcatttttatgctgtcatctggcttgggaaaaatttttccaaagccccattggtgaataccatgtcattagaaagtattttcaccttacctaatgttgggacttccaaatactaagttacctatgaaaatctctatgaagtaattaagatgattagtagtaaatacaataaataagtacacatttttacctcacatttttacacatctaataaactaacattttgttttccttttttcttaaataagaaaccagaagagggcatattagtctttcagaaatcactttgggagccacttggcccagttcagttacaattaccataaattaggcaaagaacctgctttgtattcataagggtcaggagtgaaggatttagttcctgcaagggggttagaatgacaaaaattatgaaagcagaatggtaccctcctcttaacaacttttaactatgtcaaagcttgattgctgtatatggctccatactttgacgattatgtagaagacagggaagagaaacattactgagcacttattatattggaggggttgtgctgggtactttccagaacattatcttttaaactttagagatattaccagactcctggttatagaaaagtgtgactgcagttacggccagttgtacgcaatctctctactttcctaaatgcgtattgaaaaattagtgagtggtggcagtggggaggaagggaattactaagggaattgattagtcatattaatcatttatatcttttctcctgcatccatttaaaatgaaaatggatagccatttaggtacccagaccctgccctccctggcttcctcttcccctctccatcattttcaggctcaggagtgtgtagtaggatcttgcttcaacagttggcttggactcagctccctctgagaagctctgctttcaaatcttggaaaagctcatgaggccctcctcaggaaactgcttacttctcttgcaatgtcccaggggattcgaaacaagtttgggatttccctttacccctgaagtcctttaaacagagcatcttcttgcatttgtgtctgttcgtttagatctcagcacagttccctgcctcttctggtaccacaagtgttaacaatatagggccaggagtagggtgagccaaatgaggtgcccgaggtacaaaatttgaggaggcacttcttctcgggttgtgcaagtggactggaagttgcgattccccgattctggagtgtggtcctggatatctgtacttatgtaaagcaccacagatgattctgacatatacctgttcttttttatatttaataggtaagagttttcttttgctgaaggaagtggagacatttggttcatagctaaagaagatgagattgtgctgtggaaccttgttttcgcagcacgtgataaatctcacctttaatttacagactcctcttgccccttccaagatgtttaaataataaaagatgtatcatcatcattttctgtgatcccaaattaaagcaagaggcactttcacattgaaggcgttattagcacatattttacatttctaccctttgttgtgcattattatttcagatgaaaggtaggacacctgacaactgtgtacagagatcctcaggttactagctcaggtgtaattccttcatacacaaactaactttattcatgtataaccctagctctttatattacttctaacaccagaagactctcgccacccgccgcacccccgcatcattacctttttaaaataaaacaagtaggttgatttaggggagggagagttactattttaactaattgaaacacaaaactgaaatattaaatataggtaaacattaaaaatgatgtttttcagctagaatatggttaggtgaggaagcatgtataccttaactttaaaatctgttattttctgattaaggaataaaatgctgaatttgtcaatagactggaaatctaaagaaaataatactgtacaaatacacacccacttaaaattgtactacgtctgctttacttttttaggagacataccatctggcagctgtgtctcagtgttaaacaacttgagcacaggtaatatatttgacaattaaaataatagcctcacatttattggatatgatcaaagtattaaagcatgcttatcaccagctctatggatattcagataatgtttcagtgaaaaatcatattgaattgtgctttccttatctatttatgattcactcaagtagaacacactaattgtgcaaatagggtaggaaacagccatctcacaaacttacaaggtactttacagaaatccaactgatgttcagtgtcataaatagcagtatttgtggtcatcaatgtagggcccctcttggattacttaaagtacataccgtagtctagatataggtttcttatatatcagggttttaaatatgagtgagtgatacagtaaaaccgttggttgcccctgttttcctttatcattcttcgtagaccagcaaagctggtttgtgtgtatttggtcatccgataatatattggcttgtcctatggtgcttgtatggaagaagtggaagcaccacaacacatgggcatgcgctgttatcaatttatcaatgaaaaatgcagatgtatgaaagtattaagcatatcttaatatattacttttttttgacatggagactcgctctttcgcctaggtgggagtgcagtggcgtgatctcggttcactgcaacctctgcctccgggttcaagtgattctcctgcctcagcctcccgagtagctgggattataggcatgtgccaccacgcctggcttatttttgtatttttaatagagatggggtttcaccgtgttggccaggctggtgttgaacttctgacctcaggtgatccacctacctcggcctcccaaagtgctgggattacaggcgtgagccactgcgcctggcctcaaactgctttttacctttacttaaagacaagttgagggaaccattcatttgaagaaggtgttagaagggtgtgtgtgttttgttatgacacgtttttgtacctaggcttccgttcacagccatctctgccttgcagcaagagagagtattgaatttctacttctttccttttgatcctatgaaagttgtaaatctctgtagtatgtaagttatgacctaactctccaaattacttgaatatgattgacattaagctcatattccaaatcactttgctccacagttcagttatttgtaggcaggaagcatatttgtttatgagggagcaggaagtatatttgtttatgtttttatatttcataatttctagcattgtctttggagtagtcaaatcttagcaaatgaagggatgaatgctttgtgataggctacatacattttaatgttcagttgtttttatatgggtgaatggatattggagagactaaagttttacatgtccttgaagtatacttttgttgttaatttattcatatttaaggcacaaccctatttaatattttgtgcaaaaaccaactttaaggaaatagaagtgaaaaatacatattttgatgtttggctttttcaaaaatgcaaagcatctcatttaatttccaggtagaaggaataggtattgcccaggatatatacactgcctgtgagccagtgcccgcctcttaagctgtgatgagtctgttttcctattttgggtttcaggtacagtatggtaaaagtagcctttggtggtagagatgagaatggtggaggggaacatatgcttttctataatgacagggagatctaaggttagaatgttactagcgttgcctggaagaatagtaaggcatgtggacttagaagaaggtacttatttctagtgtatccaaaacgtctcttccccgtagtggtgagttcattctgccacagccaagcctaccaggaatgattatcttttgtctctcttatgtgaagttggatgactaaggcagtgatttctgaacagcaacttttgcatattctgctagtaaatacatgctaaatatttcatgtgaattttatagtttctatttttagaaagttgtccctggaatttgtagataatactcagtaatagacattttagcaacttcatcacttttattttttaattcacataattttacaaaagttatgtccacttaaaagctttatctgcttttattttttccccagtcagatcatacttagaaaacctgaggttaacataaattatatattgatagcttcttagcagtctagcagatttcaatttcttagaaagatgttatggaaccaaaaatttgacagataaatgtaaagtgtctagcacgtgatgtgaatagtaacaaagattttatttcatttctatcaattatgctactattatgaatattacagtatatggttcttactcttcaggcatgcacatagggtctctttcatcaagaagcacatatacctggactgagagacaaattactgatttgcagtccttaattatttaatgagaaattacagtgagatcccaatatatggatttaactcttcaaaactgccccgaaaaccaggcacggaatgaaagaatatcatctttatacgataaataaataaattatatttaaaatagataaatttatattttaaatcacaactagctttgtacaaataggagcagatttattttgtacacttaagattatgggggaaatgacataaaagctcatgcaggtaaagcttatgccttctcatgtgtaaaacaaatatctaaatatatgtctatttgtgtccacatacagagttaaaggacacttttccatgaaataacacattcctttagaattgctgtagattttcataattttttaaaaacatttctattgtaacctacatcaaaagggcagccagcgttttttttgtctggctatacatatgcattataaaaaagtgagtctactgtaattaccagtttgcagagcaaattcctgcagggtttgtactctccccattagtaaaagtgataagttgaaatgtattaaaatttcactgtacaactgggagtttttgttcacagtaaatgtgttaatgtttcttcattgcttgactgtttgtgtttaaatttaggcagcgtgcccaacagggacaaaattataggataaagctatgtataaaagaaaatccttcagagagcaccagtaaggctctttttaaaaataagcagttacatacaatagtacatggctgtagccacagagaaaagttttatctgtctagttcagaattattggaatttttctttcccttgtgtaaaagttaagaggaccgagcttatgtcaatagctaatatactttgatgtaaaaacatccattattttattcagtgtcacttctataaaaagaaaaagaaatgatttctttttgttgttcctatgatgaagagaagctaatagcattttgagagagaggtgatagatcacattttcttcccgagtaaaggaattctttcttgttaagaattctaattacagcctgttatatttttggagtatttttctctgcttttcttcgttgccatgaacttagtaaatacaattattcatgtagataggcttattttttaaaaaattaatctacaaccacaatcacctagcatgaatatgtaatgaaattcacaatcacagggtaaaggctcctgtttctctgcagtctagagagggcagaagttgcagttatctgaaaatgctggctgtataatcgttggccagccagggaatcaactctcctctttctcttaaatgttcaaaatatattgtagtttttactgtttaccttttgtagtttcttctgcctgcttctctgtaagtgaaaatgaaagaatttgccagtatccatattctgtcccaaatgtctccatagatccacaaacaaatggtgtaaagaggtaaaaataaaatacgaattttcattttgcattgttgctatcttagaaatcgggttttgcaatttacctagtgtgtgtagatatctggaggggagagagagaaaaatatgaatgtatatgtgtatgtattttagtggtttgtatttgtacattcacgtacctataggaaaacataaaaagccccttggatatttcatactgtatattagctttccttcagaaaatatatttttccccttaaataggttgatctcccctgccccaagatgtttaatttttatttcttcctctacactgttctttaaaacatgaatttgtagctgataaaccttaaagtccttcatagccattactttcttttgactaatttgtagaaaggcaccatatgaaaattggatttttgatctgatggagtgattcttgagttcttacgagccatttatagtctatcaagtaaatccttcttagttcacggattattgacccaatggaccatattagctgcttcgaagctgttatagcccattatgttgattcagctgacacacatgtgaacccagtccacatgcccaagatgacattaacgttgttctagaagactttttttttctccacaaggctttgtatttatttcttaattttcaagagttagctcaaagttcctgacaaccattacataggtctcttgctttgctcagtgatgttgaagcatttgtttttagctagtcagtctgttttttcctgtctttctctttatgtctgtttttaaaaaccatctaatctttaaaagaaaaaagagaataattttttttcagcatactagcacacattttaccttcagattcatatagatgtcatagaaatttgtggaatttctctgagcatatgaatttagccctttgaatttgagaaaaccaccttttagaagaaatggtaacattgtatttgtgttttttaaaaatgtattacctgagaggtttcacttgaaaaattccagtgactctagccactggtaaaatcaagatgtgccttcattgatttatgtgaagcgctaatgaagccagtccaggtctcagcacagacccctggggaatctatgacctaacataaataacgtataagggggcacatagactgttcatcatatcactattattatttgtaacaggtatgattcctttgctgatacctgcttttaagtgaagaaacatattcttttataatcagagataattatgatacacagttagatgtacaatagaaggtattaaaatgtttgttgagatgtgtcgctgatggacagtcccaagacaggtataagtaaaatgctgtagaataaaccaagtgttcctgggaatatcttgtctcactgttttcagattttgacatttcttaatataaccatataaagactataaaatactgtgctgggtcactttctttatttaaaagtgtaccactttttggcagaaaatcctagtatatatggttaactgcttacttagcattttcacttttcaagttgcttaaacctttacccatccctctccctttttgtgtagttttgttcacatctcctatttggttataagctcctattggaactgaaaacatatctgaggaaatctcagatttgtttgaggaggaggggaacaagggggattatcaggctcctttcctcccatgcccaggctgagtagaaagagccctggattagtagctgtggccatttagggacatctcagagcctcattttctgctgtttgaaaaaatctctaattttagggattttgatgattaaatacaagaatgtatttgaaatgttatgcaagcttcatagcactgtacaaacatgggatattattagtcttacagtctgtctcaattggcctgggtaatcagttgtcatctgaaatgttaaattctaaaacgtaacaacttttctcccctgttgctttactggggtaaattttatcacaaacctagaggagtaaatttagttaaaaggtcacctacctatgctcttgcttaggaaatggattgattacagtgctttggcatttgaaataaggtgggcagctccttttataaagagggtaaagatttagaggaactcctttctttagggagcccttcacattgcatctgggaagggaaagatactgacttaggatgaggtgttatatttggcacaacttgggacaacttttgtgttacttctgtacatctttgcttcgtcaccaaagtgtgtgataatcatgcaaatcgattgttctttctaggattggaggtgcttttgaaacataccagaatttaagcttcatcttgtcttgcttcttgcttaatgaggaatagtttctttgtaaagtgcttaaaggtttataagtctttttgcatctcattataaatcctgtccttattaatgtcttctctatcatattatattagtaattgttttcatgaatgccacagagaaatgtaatcacattaccatctttcaaattgcattagtgaaaatgaataaaatatatatcaatggaatacaaaattgctgattcaacattaagatgaaatgagattattattacttagcatcatcagatatgagaagtgctttgcctccttctataaagttaggtgttctggtaaatatagactgagttaaaatgtgtgtttttctttttttaatggcgagctaaccccttattttcaattaggtgataggtctgttcatggaaggactatttactttctatttatgttattacagctgcctaagtagcctgtaaaatttgtaagtatacaggcaataaatggagtatcttaattgttaaatgttaggtaagaaaataaaatgtttttgcctaaattgaaatgccttttcatttcatgtttctttaatattactaattgcctaacaaaatcgcatgtattatcataggcctaatttaattgaaacacacacacacacacgcactccaaagcttgcgtatgctttgatgccatagaagcatgggtattttccttatataattggctatatcccgctgttgatttttactctgaacttctaaattatttaaatggggcctttcttatatcgattgatagtaggttgtgatagtaggtaatgactatggatgcttattggatctctgtctgggaaaatttatatgcctgtgtgtgtccctttctccctgtttgtatttatatattcacacagttgtagaaacatttacactcatatataaacatatgcccagaagtttctggttttccctctttgcctattccccctaagccaaatttgtatcttggcttttgctgaaataatttttttcatcacagtaaattgaggatttttttttttgctggtatacatgacagaattcagcattgtcaatttttaacaaattatcttagaatttttttaatactttgatattaatattgctgagcatcataactgagaagttttgtttttgtttttgcttttgcttttttgccccgcaaatatttgaaagatgtactggatttttccggatagaaaaatggcagtggatttttaaatggatatattaggttttaatattttcaaagtagaaaggattttcaaatataagcaacagtaaaatttctttgttcaccgtccgtgtattaactcacttagcatttgtgtattggagacctactgggcaaaagatgtgctgcattatgtctcctggggaatgatatcttatgggattaaatggttttaacaccactaaaagaaagtaggtggggcagtgggattcctcccaccctttccctgttttaaacagcttgattgagatatgtttcacttaccatacattccacccatttaaaatactcactgtattttactatatttatggttaggttcagttatcactgaacatttttatcacctcaaaaagaaactccatgccctttagctgtcaccctaagcctcatcccccacaaggcagccactaatctactttttatcattacatatttccctcttctgaacatttcatctgaatggaataataatatttggtcttttatgactggctcctgcaactcagcttagtgtttttcatgttcattcatgttgtagtatgtatccgtggttcattcctttttatggccaaataaaatttcattatattaatatactgaattttgtttatccatttgtcagtggatggagggatagcgttttataaaatgaagttttaaatctcctgatttttaacatcatttgatgttcaaaggtcaacttttcccagtgaatctctttcgattattttggatgtgtttattgtgaagatgatgtatttctttggttcataacatttttctcaaggttttttttggggggaggggaggggtggttaaccatctttaaattgcccagctttttgtcttttaccatgttgcctgcagtttaaaccaatggtacctggccttttagtgagtccagcaaacccaggctcttgcgaatctcctgtctcagttataagatctaatgtgttttttcgttgagaagacaccaagaaatttcagaacacattaagtacaacaaaataatcattttttaccagcttgctatttcttcatatgacattaaaaacaattagacaaatgtaaggacctttctttgaattgttaattaatttttaattttctggttaccaccaaataagagacatacttttaggtataattttccatcatatgaatgtttgagtagatttttttaaggagacagaataacttcattgtttctcatttgctgctgttactattacattaggagtagtgacatttgcactatggtttaacatgcttgtggacccttaacatttataatcagttttataatcactgataatcatagcatgtaaattctgtgtgcattgttcattcagacttagatttatgtatttctttgtataaatggagaaaacatacccaccttactaaaactatagatttatattaatactctcatggtcagaattagatagacgttttaggttgttaataaagcttttttgtgggatgtttaaaaccgtagatcttttgacccatgttctgtatctttctgactcacctcttccttgtctccttttgatacttggttgcaaaactcttcagtacaacaggtggatattcttttacattcgtcatagatgagttttgtaatcaagtacaagtgaaattgatatgtagtcttgtagttcatgctggtcttaagtaagcttagtagttgtccaccgtgcaagaaaaaatgcagaattttttcgctcaagctgtattgtgatgtggccagttaggaagctgatttcttctcccaaggcagtattatataaattctgaaaattatacagggagatatttgctgacttaatcaccattactatcatgtgagttttttagtctttgtggcaatgtttgaagtactgtcttagcatatcatacacaacctatataaaagtgcttgtttcatctttttggtcatgtttataagatcactctctgcatccacaatgctagcaagccattagtttgtttattgcagtgtattctatggcaatcctggaataattagctttcagattcattacagataatttgctattccagattttcgtccactaggatagacgtcttttgtgtgtgtgtgtgagatgaaggtctcactcttccatccaggctgggagtgcagtggtatgatcatggtttactgcatccttgacctctgaggctcaagcagtcttcccgcctcagcctcccgcgtagctagaaccacaggtgcatgccaccacgcccggcgaatttttcatatttttatagagacgaggtttcgccatgttgtccaggctggtctttggctcaagctatgtgctctcctcggcctcccaaattgctgagattacaggcatgagccactattccctgctaggatagaaatgtctttgaagaacaaattttctttttttaagccaggcacagtggctcatgcctgtaatcctagcactttgggaggccgaggcaggtggatcacatgaggtcaagaattcaagaacagcctggccaacatggtgaaaccctgtctctactaaaaataccaaaattagccagccatgatggtgggcgcctgaaatcccagctacgtgggaggctgaggcaggagaatctcttgaacctgggaggcggaggttgcagcgagccaagattgtgccattgcactctagcctgggcaacaagagcaaaactctgtctcaaaaagaaaaattaaaaaaaaatttcttcttttccctccattagagcattttattaattattgtgatgcattttcttttaccgctgtacatactggctaatttttatattttttgtagagaccgggttttgccatgttgcccaggctggtctcgaactcctgggctcaagccatcctcctgcctcagcctcccaaagtgctgggattacaggtttaagccaccacacctgagtggctgcttatgttaatgactagctttttctataatttaatattaatgtaggtcatgtacttaactattaagcattttaaaatattttaaaatttcataattcatattgtaaatcttgctatactctccagaaattaacaaggggaaagaagagttaaaaaggtttttagggccaggcaccgtggcttacgcctgtaattccagcactttgagaggccgaggcgggtggatcacgaagtcaggagtttgagaccagcctgaccaacatggtgaaaccctgtctctactaaaaatataaaaaattagcccggtgtggtggtgcgtgcatgtaatcccagctactcaggaggctgaggtgggagaatcacttgaaccctggaggcggaggttgcagtgagctgagattgcaccaccgtactccagcctgggtgacagagtgagattccgtctcaaaaacaaacaaacaaacaaacaaacaaaaaatggcttttaggccaggtgcaatgactcacacctataatcccagcactttgggaggctgaggcgggcaaatcgcttgagcttaggagtttgagaccagtctgggcaacatggtgagaccctgtctctactgaaaatacaaaaattagccagaagtggtggtgtgcacctgtagtcccagctacttgggaggctgaggtgggaggattgtttgagcccaagaggcagaggttgcagtgagccgagattatgccactgcactccagcctcggtaacagagcgagatctgtctcagaaaaaaacaacaaaatttttttttttagttatgtatgggagattggtgaaggttaatgaacccatgaagggagctccttgtgaatagttgtttttggttttgtttgtgtgtggaacaccaaaacccagaaccggaatcagttttttcccctctcattatgattagtcgttcagaatatgtgctttatgcttctatttgcccaaaggccatattttgcatttttaaatttgcgtcagataactgggataagtgtccctaaacaactgctaataggagttttatcagttagccttgtgtgtagttcttttgtgaagtaccctatatatttactgaaacaacaatttgtgctttcctgagaaatatgatttggtcagaagattggggttcaattcacataaacttgcagaattggaaccaactgtagagctagagacctcagctttagtgataacagaacctatcctctgtattagagctttggaatgcatccaaaatactttcaaatgtacttttatttaatattcagatataaaagtgttactgaccaaacattgattagtttttttactaaattattcttctttgtatattttagatgtacttttgcatatgaatatttataattatttttattgtaagttttctttagttttctacaggtaatggaaataaactgagtcataattgggagatttgtcttcttctccactagatcatttaagagccgtgtaaaacacataaacgtttctgaaccataatagtaaaacagaaataataatctgtgtgcctaccttagaggactatagtatgaataatatggtattatgtatgtcaaagtgttcatttatttattaagactaaatatgtgttaagcaatttgcaaggtgttggagtaaaacaatacattgggaagaatcataagagagaaaacaatcatttaaatgtaatatgtggaaagtttcttgtggccataaatggttgtcatttattgagcttttcctgttgccggataggttaacacttactttttcttcattatttcatttgagtgttttgccactgttgcaatgtcattgttactatcattttacagatgaggaagcgggctcagagaatcatgtatttttaaagtgccttttgagcacctgttatttgccactatacattgaaagcccaacagacatgtctatcctgccctcatggaacttaaattctagaggggaaaacaaacccatatcgataatcacaccaataaatataatattcacaacctgtactaagcattatgacagatcaattatgatacagaagtctagtggggaacttgtcttgaatgggagacagggcagctgccctgggaaatgagtggtacttgaactccaaagaataagtagccgttaacaacttaagcaggacttggaaggagggaagctagagagcacggtgttggagaagtagggattgagaatttggatagcagaggagtcagctgtccaaccaaggagaatggacagccactgtttctactctagtaggcagaatctgacaggagggtgaaaataacctcagtcaagcaaatagcaatcaaccgtgtggatctcttaagaagagagaatgttcatgcagatggggagagaagagaaacgtgtaggttaattaggagacagtttaaatagtctagaaaaaaagactggaattatggtagtaaccgtgagaataaaagacaggaaaggaagggatacataatctttggagaaaggcagaatatcagtgaaaactctgccctataacttgctgtgaatggaatcgtagctcaggattcttagctcaacgtgatggtgcacgcctgtagtcccagctactggggaagctgaggtgggaggattgcttgaacctgaaaggttgaggctgcagtgagccatgatctcaccactgtactccagcctgggtgacagagctagactctgtctctttgaaaaacagaaggaaaaaaaaaaaaaaaagattcctagtcagtggaatggagagttgtttctgatttatagatctgtgactttactagttgattgactttaggtaagttagtaaattatctctaccttagtttcctctgtgaaataaaagtaatagtagtaacaactttatgctattttctgagaactaagaatgctgatgtttgtaaactctgtagcacagtgtctggaaaatggaagatattcaatacatctagctattattataacaggtaataatttactattgtaaataaataaattaaaatcctgaggtttggtagaggaggaataatgcataggagatagtcctccaatctgtgtaagggtttcatttatgttcttagttagggtctctcctctaaactcactgcccccaaaccccaaactatcaagtccttgatcacagggacactgccatccacttcccaccacttaagaggcagtgcctggctccacagtgacggtttttgcttagtggtgatatttgaagctgtaggagggcgtgaagttgccaaattaaagaatgaagagcttggccatgggaaacacctgtatttatttacagtggagagagagagagagagaggagagagcagttgatgccagaaaaactaggatagtcagtctctacagcccaggaatgaaggagagttagtgcagcaagctgcatcacagtctgggaggacaaggagactagaaaaaaggaccagatgggatgagaacattgcctctcagagagacagtttcaggcacgtgtggggcagaatctggattgtagagttaaaatgtaggtggtggtgaggaagtgggagcactggttgctgggtgcatggatttctctttcaagaagtcaatggtaaaggtaagcagaaggaataattactttcaataaggtgcagacttaagaaaatgtatggttgttgttatggttgttcttggggagttgggatatgctgatcatcttcactgctgcctccattcagctcatgtctgagagcctccaaccctcttctgggcactcggaacaagaccaagctgtatgtggtacattctgtgaacgacaaactttgaaaatgcaggtataaagaaaagagcagacagtttccaataatggaaattgaggaaagaattacaaggcaccctggcacccttgttaggctgggtcctggaggcctgctttacccagacctgaatactaatctctgcatagataggtgggaacactctgactgaactctctgctcctttctgcatacctgcattttcaaagtgtgtagttcacagaatataacagcttggtcttgtcccgagtgcccagaagagggttggaggcactcagacatgagctgaatggaggcagctgtgaacatgctcacaagaatgaaagcatattcatttcgactcttcccaactgtctccttgtaatgcatgtacatttttgaggcttaactggttttgatagttttatgataacttatgttatttgcgtgtgggtgagttggccagtgatcacgttggttctattttgttgtgaataaatagtatgtcaaagttttatgctgtttcaaaaatgttatttagaataaaacttcctttgaagcggcaatagtctcttactcaaaatatttatttagaccatattgtttaaatatatataattctcttaagggaaaattgtagtctatataaatctgaatttaaaacaaatagaccttctggaattcatagatatacaaaatggatattctagtgcttaagtgtttatatacaaaaggagttgaggtgttccagtgtttgcatgtttaggtacaaaaagaatagaattcataaaaaggaataatgatctaaaaagttgaattcccgaatgtaccaaatgtgtaaagttatttaggaagacaaaatatttgaatcataaacttgttcagagtaagtgaatgaatgattcaaccagtaaaaaaaataaatacacataaaaataaatcaaatccacagtctgttaatttgttctcgtcttaaatatggctgtaattaaagttgatgaaagtgtgctttaaagacaatacaaaattaggatatttttataaaataattaaatattatcaaattaatgatttaaatatttgtgtcttttgtgctggagtttatattaactgtccttgaaataccatctcattttattggccctcccttgatttcggtaaagcagagctattttttttaaagcatttatgaaagcttttattattgcacttcaaattatatgaatgttttaatgtcaacatagttcccgtatctgaatttataattagataatttgtaaagttcttgtttttagtggaaatgctgtcctctaagctctttttattttggtcacagtacaatcaagttttgagttcattaactaatgaacatgttatttaaataaactatttctgacttgggatgttctgatatatttctcagttaacaaattattgaaatttaagaacttctggaagaaacgtttctccttatagtctacaaattaatcacttctatatacaacaaagtttacaacctagctacaattggaccatgtttggaagagagatcctgaaatatcagggagattatacaattaaatatttccctagtgctaaattgaagcacaaattaaagatgggggtgaagtatgaatggagtctacagtgaggactccaacatctgaaaccaatagggatccatagatttaatattaattaatggaagagaaatattttacacttgcctgatctaaagcatagggaatggtaaaagcctgctcagtcttattctctgtgaatggaatttgtcccagtcatgttaacaatatccaaaatactgcctgttacaaatgagacagtttctataaaaatcctaatggttccagaaatatgagcatctggagctgtgtgagtgagcatggctttcaggcacagagctgcagtttcaggtatccccatgcccacccctccaccccagaatcagtaatcattgattgcatctaaatctgcagagagatcttttcctggcagttcaagtagttacagtagattgttaatctgcgaatgatcagactaaatcccttctgtcttcagaatttctatgcaaattagaattaactgtatgagataaatttattaactgtagtccgggagcttaggtcagctttagcactattcttaaacataggtttttattcataaaaagttacactccatttatgctaattttctatggattcattttataatattaactggtgagatggttttttaaagtggttataaggaaatgaaagatttttaagtgtgtttttcagttttctgcaatacaggtgtactgttccagatataaaatattcacataaatgattttttctgttccatgtctgatctgaaaccaaaatttaaacttattttctttcttatgtcactgttgaaataagaggaggattgttttttatttttcaaaacaggaacgaaaatagaataaaaaatattcaaggaattgggatgtgattaaataataatagaaatatgttaggtcttattgagcacaggagtgtctttaaaatatatttgagagtttagcacaacatttaattgaaattcagcagaagaaaagtaatattctaataataatatttgtgtgccatattttactttcacaaacatttcacttgaatattattttgttacagtgtattttttgctttattgacaagtagagaaatttaagtggaaatatatattagcagcaatatacttttttcttttttggatttgtgatgtcgtaaatccggtatcttatcgaatatgtaatcctttatttttattctaagtttgtaatttaaaggttactgtgaatgacctaaaacattgtattagtgaatgagcttttgttttctttaccttttttaataagagattttggtgatatctaaatttatttttaaaactctccaggcccctaccatcataaaatctttaaaaatagaagtgggcaatatttattgaaatggtgaaaagagtatagtatctttgaacagatgctgacctttttttcctcctttatttttcaggccatccgttgcacactggtaaactgcacatgtgaatgttttcagccagggaagattaacctgaggacttgtgatcagtgtaaacatggctgggtggcacatggtgaggaaaatctgggcttttcttcccgttcttattatgttcatgttcgtgtgtgtgtgtgtgtgtgtgtgtgtgtgtgtgtgtgtgtgtctgtttagaggagtcactggcctggagaagagagaggtcagctgtgctccaagtgttagttaagattcagcctgcggctctaaaacagcatattctcagctccaaggagctaggcgagcagctctcagcagaaggccaagatgtttataggacagttgggctgtgaagttcttactgagcatgggcgcagccagcaagcaccaggcctgatggaaactcaaacataccacagttggcctttcagggcctggacctcagagggaagctggcaaatcctccttgcttgagaactcctcgatgactgctcacccttgtcgtatgtgctcggggctgagcttatccttctagatgttaaatgttgtatggtctcaggtggacgagagagtgaacgggaacattatttggctggtatctgaaaatataacctgtaaatactccctttcagtgtgcatggggattggaggtggtcgacgtaggtagagtgtgagctctgtgtaggtgtgtgctggggtggggagaccccacgcgaaggatatgagtgttgagggtttttgccaggtgcacagagccgttctgtcagtgtgccctgaccgagcgttcagcatattcctgtgtatggtttatgtttattctgtttaagtaaaaggagacttggaaataagcagacgtttttttttccacctcccagactgtagaatttaaaaagataggtaatgtttataaaaagaaatcctggcttgagattttttgacagccccgggtattgcctcttaagtggacatattcttcattcccaagcagtgccaaacatccagtgggttgtatttttataaatgtcatgttattctagcaacatctgaggtaacaacactgggccatgcctcgaaatgcttttaatttatcatgtaccttgcttgtgagggcgtgtgtgatggagttgcggggacatttcagccatgtttctgtgagagagagtactctgagaggaatacccgggaaggggtatgtttccaccatgcagccacaatcctgcagtccttcatgcccacagggatagagcgctttcctgctttattaacaaggcccaaatcagcaacaggtctcagtccagtcttgaacaacagatgagctgcatttacttctgcagtctctttatgttactacattcaatgatttcgtctctcttcatatattagtttgctagggctgccataacaaaatgccacaggctgggtggcttagagagcagaaatttatatcctcaaagctctggaggctagaattccaagatcaaagtgttggcagggttggtttcattctgaggcttctcctcctcatttgtagatggtcacctttacatggtctctcctctgtgggagcatgccctggtgtctgcaacctccaactcccgggttcaagcggttctccttcctcagccttctgagtagctgggattacaggcatgcgccaccacacccagctaatttttgtatttttagtagagacgggttttcaccaggttggccaggctggtctcgaactcccgacctcatgatctgccagcctcggcctcccagagtgctgggattataggtgtgagccactgtgcccagcactggtgtcttcttgtgcatccagatttcctctaataaggacaccagtcagattggattagggcccaccctaagggcctcattttaacttaatcacctctttaaataccctatattcaaatatagtcacattctgaggtagtaggggttatgacttcaacatagtaattttgggagaacacaagcccataacagttcccaaatatcctttttttctctgaagaagtattggttttgctgggtaataggtacagagcttatatcctaaactcatcagaaccatatgaatattggaggcagtttggttgtagactgttctgaggtcaaatcctggctctgtcacctcatgacatgttaatattgctggacttcagttttcttgcctgtaaaataggattaatagttcctactttacagtcttattatgaaaattaaagagaaaatatatgaagcctttctaactaatacatattaaaagtaaaatggacagtagatgagcactaaaggggaggccagtcgttgaacaaaggcgtttcatttattcgctctcatttttgccaaagccatcttgtattatcattatctatctactatggtagccttggagtataaaagttaactgtgtcaccagtttgttttatctatttaatgtccatgtgcatattacattagtaatgtaaaggaaaaagcaatgttttttccttcttgaacaacataaattattcctggccagtgattgtttcgaggactttctgaagaatgtcatttttcacccaacttgaataagatgtttttgttacaccagactgtgctttttctactgtaccattaaaaattctatgtttctaggatattaattttggtgtttctcagaccttagcaaaatgtattctaattctttcctttacaattatcaccttgacctcttttttcccacaacagggagatatctgtatacagctcaaaatgcatacacccaagcatgtgaatcccacactctccccattcatgaggccaaatacagcagtgaggggttggcctctagccttggagttggcagtgggatgacagcacccactctttttgcccctagcattacaactaattgcttcattccctctctctgcacagaaaccctgaaatcgtgtctccaatgacttctgctcagaggtgaaacacagcattctttccggctgccttatactgtgcagtgtcctgggtgtggggcaatgaggaagtgacttgggttttctagtgtgtaattttcctctgaaatgcatggaacagcaacaaaactaccaagatacattgcccagaatggtttcatggtagcactgaatgcattctacctgtcattatgtcaataaaaaaatttttaatatctgctgctaaaaaataaccaaatgccaaaatcatgtattctctctaaaacagatttttagaaatttgttgacctcctttcttgaataaattatccttgttaacagcattttcagttcattcctaagatgttggatttcatgggtcattatctaccatatatatgcacatatgtgtgtctctgtatatgtacacacacagaaacacacgcacattctctctgttgacttacagattgcttactaaagctgcgtaagttgttgacgttaactactttacaaaaatctttagaaatgtgtttctaaaaaattaaaagctgggtgtggtgtgtctgacagcctgtattcccagcactttgcgaggttgagacaggtggatcgcttgagcccaggagttcaagaccaacctgggcaacatggcaaaatcttgtctctacaaaaagtacaaaaattagtccggtgtgtttgcgtgtgctctcggtcccaactactttgaaggctggggtgggaggtttgattgagcctaagaggtcaaggctgcagtgagctgagatcatgccaccacattccaatctgggtgacagagcaagactctgtctcaaaaataaaaaaaaaataataaattaaagagtgattaattcattatactgcaacacctgggttttgaaattattaatacttagtgggctgtgttacttttcacagagtattttcttaaaatccttagcactattgagttaagggaggaaggaatctcagagcagttctgaataccagtaggtatttcccactaaattaataaaggatttcctaccttaccaccaccctgcccacattaaggaatcttagctctttcactctgataatagaaagcagggcttattgaatttacttaaacatttttttttctcttggtaaaagatggccatacctagtctgtaataatttagttgatgggccagaaatggctcagaatttctaattctgtcaagtctctgtaaaaggactccagtttactgccactacttcactgaaatactataaatactatattttttactttcccttgtttgctttatcttctcagtgcgtttccttcattcacctaaaacaatctgagtatggcttgaaaaacaataacaacaaaagttttttagagctctttttggttcgaaagtggcaaaataagattaagatatcaggataagagcagtaatgggctccttttctggtgatgtaatttttttttttctttttaccctttgcctccacactagagtagcaatttggccattcacagaattcagacttcagccaaatattttacagaatgttaaaaattagctggtacaactagaatacactcagcattgggtgcaggtgggagtgagtcctacttactattctcccttgaagaatacctgcttctaacaggaagcattaccaataggagtttgctgtcttcgtgaaaaaaaacaggaggcatgatgtaaaggttgaggactgctgcacgaaaccatttttattgtttaatatttgcaagttagttttaatgtccatagtttagatgaggactttatttctaaaccattaagatgaaggtaaataaaatagtaaaaataagaaagaaaacaaactgaattctaaggcgttttaggaaatatttaatgataatccagtacaactggaaaattgtttttatcccatgatatttgatttgtgtatttgataaaagaggtgggcagattttacagaggtaattcatttagaatttttttttaaactagatcagtaactttttcttctgatgaagctcatttgttaagaccatctcttttttggaaaaaaacaaaaaaaaatttttttttaattccactgtttcctaggtatgtgaggtgagcatttggcaagaatatgagacttgatgaataaaaaatacattttatagcttaacgcacccacagcagctttctctgtgcaaattattttctttttttttctttgactttaaatgaaaggatataccattccaacaagctgcatgaatactagaatcttcattcactttcaagagatctgaattaataccagtgttatttcctttggctgaggtctgcctgcaagaatgcttgttgcactggaattttgagacctttcttttattatgttctgtaaatgtgatttccttttactgcatgcatttcattcgaggaaaagatagttttacattattactttaattatttactaattaagccagcttttttcctgcctatattttctccaaactcctgatttttttttaatgtaaagtaagcagacctggtctacatcatccagatcatcagtcagtagatatttattaaacctatctcatacatgaaggattgtgccaggtagccttcagttcttccacggaaatgatgagaagtataaagttaatttagtatcatataccaaccagctttatggtttaatgtactgtaagacttaatatgcatataacccattaatttcaaacctttttttttgtattcactggatataatttttcttttttttttctcagcatggttgaatttgaattttcagcttgtacttgatatgtcttatcagaccaggggtatttatagagaccttcacccaaatagaaaatatagaatttttgattgaatctgaatatcaataaacaataaatgattttaaatataaatattaccatgcaaatttaggtgagagtcctttatgtttatttgctaaatctggcaagcccatacctaaaagaaaatcctattcagactcaatttgcataaatcctaaatcagggctattggtcataagcatcctataatcaaaaaggttttgggccaggcgcggtggctcacgcctgtaatcccagcactttgggaggccgaggcaggtggatcaggaggtcaggagattgagaccatcctggccaacatggtgaaaccccgtctctactaaaaatacaaaaattagctgggtgtggtggtgcgtacctgtaatcccagctactcgggaggctgaagcatgagaatcgcttaaacccaggaggtggaggttgcagtgagccgagattgtgccattgcactccagcatggcgacagagcgagactccatctcaacaacaacaacaaaaaaagctgttgattatatcagtcctacatttagaatcatgagatctcagtattttatttacaaattcctcaagttcgttggaggcatggtagtttgtaaggacttacaagcaaggcagatcaaaacaagtaatttttcattttgtcctatgaaagttcacatgtctttattatttgtcccagtctatgttcttataaattgtctaaatatctgtgaaagtggtttgttcccaactggtaactctctaatattctccctgacttgagtccaaaacctagcataactaaagtagtccagtcttttccttgccaatctcttttcttccctagtcttctctccttcccactccgcatagaaattcctttatcataagaataaagcatgacatttctgtgatatcatgctcattctgagtgactccacaacagtgtccatatgataatttgtaaatgtgtcaagataaagagaggagactaaaaaacaactaagtttcgtctgacaaagggagataatgttcccagcaagctctggcttggagactatcccaacgaaaacaacattttctttcgtagaaatttttttccagaggggtgtttagggtttggtgaacagtagcacaggcactaatttgagtcctcaggggaagggaagtacatgcttagcagtggcaaagtaagaaccagatccttaggggaaatgtttctagggctttgttcagaaacacaaggatagaaacactatcgtcttcttcccttggtgcactcgtttggaaaaagcggaagctggtgcagtatctgcttaaagaatttgtctttctagtggacttagtttttccagattgtaaatgctgaaacccggctttgcctagctgcaaaattctcttttgctcagggaaaacagcttttagctgcctcctagttttggtgaggcagctggattctggtctctccatgagcaaagtccttggacttttttcttcgttttagagagcaaaagcaaggccattttcctgcctggcacaggaggcttttttgggcttgacctgagggcacagtgccctcttctgcctctctcctttacttgctgatcactgctgataagctctaaagggaagacatcctcataaatgcaaaggtttggtgcttgattaatggcactaagtattttcttattgtgtctctgagcagcttttgatttgtttctcagcctgcacactttttggatggtgctttgcactccttaaattttctttaaacccagcgcaaacagtgcctccccttcaaagtcctgggctgtctgcctattagctccccagattttctttttttcctagctatgttttattcagatggaacataaagtgaggctggcaagacctggcctccagtgtagtcactgctggtctgctggtaaggagtttcgtgggagggtgttgagaatgaaacacacagagctgtatcccgcttcgggtgaatgaatgggaggcaatatacaaaataggtaagaatgttgttcttgaatgagactgtttacattcacgtcgcggctctgtcacctactgtaggtagaatcttgccaagttgtataatctctctgttctgtcatctgtgaaatgtgagtgatgatagctcctagctcatagtgttcttctaagattaaatgagataatccagatgcctcatacatagtatacacttaataagtgttagttgctgttatcactaacttcctataaaagtaagacttcaacactgtggacatgatagacatgttttagcaaagtagagtgattaaaagttgggtgtggccaggccagtggtcaaatcccttctctgccttttgttagtaatgccttctctaagactcagttatttcatcgagaaattcggataataatagcaatgcatctaaataacacagattcattttgagagaggattacatgaaagagtagggttagcccaatattctggcacaacaattttaggagctagtattgttattgctaagtcaataaaataatattaaacatcaatattaatgataatatctagtgtctcccttaaggtacgaatgtggaatgtgttgggatgaaactatttctccttccagggaaggttttcttcagtatgcagttgcagaggtcaggtcaccagttcttttggctgttggaccaagtgttccgtaggtgaaattgttttcccaagcaaatccagtatagttccataccttccatttcccctaaaatgtcatttgagcccttatttgaacacagtaaggaatattttacaccaaaagtcattttgagaattgcgccagttaaaataaattatagtaatatttacctgctaaaaatccaaaagctataagtaggtgaattttaggtaggattaaggctacttttacctattttcacacctgtctttttgcatgtgaagtgcttcgatgggctcgccactttatcattttattgcattttattacatcataaatttttatatcttgctaacgatcctacaggaagcttaattgtttataggagcatcttaattaactggagttcaccaggttaagcagaacacaaattgaagggtttataaatgaaacacactcaactcctctccttttactcaggataaactaggagattcggctgggtcgtaaggaccccatatgcctcagcaatatcatgttgatcctttcaaccactcttccttctctattatgtcataaatggtgacttctaactcctctcccctctttactgaagtgtgaaattgctggataagtacagtatttcaaagataactctgaattgtattctgggagccctaaaatgttgtttatacatcccatttcttaccaggttttgcctttgtagatgtttatatatcttcaaaaggttcttgaattaatttgttattagttcgcatatacccaaagaattgtataagaagtgctttaagtattactttaagtattaccacaactggatagacttgtaaccagtatttgttaaaaggcccagtagtgagattcctctcttcgttcagctgctccctggtacccagggagatccccactttgacctcatgggcctctttgccttctgtacagtcaagtgacgctacaaatttaaatgcaaacccatctaattgaaaggacagtcttgggccttagattctactcgccaagaaatgtaaaggcaactctacacctggctgtccaataaggaagccactgttatggctttgaacacttgaaatgtggctagtccaaattgagatgtgatgtaggtataaagtgtacaccaaattttggagctgtcatcttatttaaaaaaagaatgtaaaatagtcattaagagttgttcttccatatatttttgatttatcatgtcaaatacgtttttaaacatcacttttttactattttacttgaaactagaaaaattaaaattctgtatcttggcttgaattatatttctttctttttctttttctgttttttttttttttttgagacagggtcttgctctgtcacccagatgcaatggtgcaatgtcatctcattgcaacttccccttcctgggttcaagcaatcctcccacctcagcctcctgagtagctgggaccacaggtgtgcgctaccacgcccagctaatttttgtattttttgtagagatagggtttcgtcttgttgcccaggctggtctcaagctcctagatgcaaatgatcttcccgcactggctcccaaagcactgagattacagctgtgagcctccgtgcccggccataaattatatttccattagacgtggtaatcgtaggctctaggtatgagagaatatatttggagagctaaagcctaggttaaagtggtttggtggcagagtagttagaattggtgtgataatcctaacaccctaaatccaggctcttgtcccttgagtcaccactgtaaactctttcccagtttttcgtactttgacgcttgctgcactattgatcctggccagtttttcctgtgccttgttcatcaagaaagtgggattcccacccctttactcccctctgcaccaccactccccacccccggagcaattaagtgctcccttctttattttctcaatacactttgctgagaccagaggtttctgggtaatactgatccttccactaacttgaaaagctcaggaagggcacttcacctttgtgtgctggaacatactgcagcatctcatgtggtgcatggaacaaaggtttattgaaactctaagcttatggaaaagtctcactcagattcctaattgccatttgcttttccagcagcctcttcccattttaaggtataagcacagcccacaaacaccttgtctttatgcccatttgtgcgtttttcttttccagttctcattctattttcacctttgctgtttccctctgtcttcagacaacaaaataagtgaaaggtaagtgggaggttttagcagcccaaacatccaggaagtaaattttagagaagttaaatttgtttaatcattaacagatgttggtgtttttgttttattcagaagataagatcttgagtgaaataccttcggctttccagtttttttatattcctttgcctgcaaaaatctgagggtaagacattacccacccgcctccttttggctaatcgtgttttccactatcagtaaaaattaaaaaacaaatcaacctctaacataaaagaaaacacctgtttggcttggagaacttggctagggaggtgttttttctgacatgccaaaagcgaccatcacaaggccccttaaaaaaaaagtcatttttttttctatatttcatgtgagcattggcagaaactctgacaagcagttcttcatattttattatgttcttgtctgcagaatctgtgtcaggcaaaaaccttgtcagcggaaaacctgtcgtaggatcagaggagacaaaaacaggtgtcacacaggcagtcaaaactgaaggaaaaaaaagattaggctaaagagagagaggcagacaattacattaatgccattgcttttatcttatagatgtgtgttattatctcggggtgctgagtgcgcaattgcctcaaagaaaagtagacaggagacaaggggaaacttgatagttattaactgaagaggcagtgtgtcaaagctggatggggttcaaagttttgcaaaggaaaaaaactgcaggcagcaagcaacggctgtgtggttctgctttcggctacataaaccgagtagctatctaacattttctacttggaaacagatcatagaaggaaaaattaatgaaagatttcatttggagttcttgggggataacatttatcctatatatatgtgaatgaatcatataaccttttctctcttacaaaatcttgctacaatgtgagacatggtgaggcatgaagacaggcatttgtcagttcagctgtgttgtttggatatatttaaaacacctattatcaacacacttttaattaaaaaaagctattaagaagcccttttactaagtgtgaacatctgtatgtgcaagctgtaaattaggagatcacatatgtgtgcctcagtcagagactaaatgaatttggcaagtgttttcttttactggtttttaaatacagtaaaatatctcaaggaaaaattgctacattttacaatttgtattgactcttttgattgtgcccgttggtactgattaattgaacttatctaattagaaattttctaattagaaattagggttactatcatgatcaaattagtaaacagaattcaaagcactaaccaatatatcccctctgtttctttattcacattatttcagatgtcacttcttttctgaaagtttgcgctccattaaatatgtgtgatggtataaaatactttcgttttgccaatggtctaaatcccaaaagagtttttgccttgttgataactcatacatgtcaaacagcccactaatagagaatgggatggtaactttaggtttccctatctgctcaatgatatgttgatcacattagtggaaaaatcggcagatactgctttagttcttaacattttctacttgtgcatttaagatttcgttaggttagacttttcctaagccctaggactgccctcttaacccgtttttatgaggaaatctttacatagggtctttttatcccaccggttactgatacaaagcagtttgatacttgatatatgcattaagcaaatccagcagtccagaagaaaacacacgtcagtgccaaaagtgtgtgtgatagcctagagattttaagggattacagtggggaaaacagattgattatagatttagagtgagatttcagcctgaattactgggggaaggaggaaaaattacttgtgacacaaaggtgacattcatttttctttttcaagactgagtataataatttctttcttttagatatttccctaccagatgctggctttttataccacgactctcaattttgaaatattttttcacatgtgatagtttaaagcatatattttatcaaatagtaaatatgccttgcctttgcactttttgcttaatgaaattcttatatagatatatgttcctttaagaaaattaagtctttaaagtgaataactggggggtagggtgattattttcttacagaagaattcgtatttttgtttaataaaaggatgtacatagttaattcaggtagcaaatctcaatagttacttttaaaatgagatatgttttatagtcagtgtactgtgtattaaatccattggtacataaactggataaagcagggtttgtgtagccaactttaagctggctgaggcaactggagattggatagaacagcagtggcaataataataattcccaaacctggtttcagcaagtagattcagttactaaatctcttcttagatctactgtcaaatttgcagataaaattttctctttgcctgttaccaccttcatgtggagttgctgcaaaagagcaaaggcatgcccccaaaagtgggccatgtaagaaagaagaagcgggagaataagtataaccaaggacctgtttaatctactagccaggagagagagcttctgaacaaccgagtggtgaaatacttttatgtgtgcctcagtcagactttaatgcttttcaaagtctgttttgaggactttattatgcgtaaggccacagggggaaatgccattcagtttgaaatattggctgtatagtctcgagtggagctcagtgtctaccctggactaattgtgggtgtttatatgtgtatgtatatccacataccctgaaagctacatgtcaactgaggttgattaaaatccgtaggacagtggggcttaactggaactacttttgtccctcttccctccctacagtttggaattacattcataataaaccatgagagtatttatacattatccctcatgtattaagagatgagaaaaaaaatcaagggccattcacataatgtatataaggtatagtaatgtaatgaggatttgtagaggttcagtggagtttattcattttaaaaaacactgacacactatttgttgaagaaaaaaaaaaaaaccctttgtacataagggttgacagtttttatcaccacacttggggatcaactcttttagctaaataccattcgttttcttcttctctttaaaaaaaaaaaaaaaactctagaagcaagccttggtattaaatatcctaattaattcaaccttgacagttacagttagaaagttgtgacttaaatggaacatgagttattttgtacttaacttgctcccagttacatagttctttcccccagaagtagtgaataaaatgtgcagatctaaatattacttcacgtcataagaaatttttctcttaatcacaattgttgcctgccttcacgatctcctgattcactaaaaagttttaatgtgtcatcattgccctatattaatgttctccccaagtgttaaggcttttattaggatctagcttacaatctaagagtagactaagtctttgccttgagccctgatgcttttgcctggtaagagagctgagtcttacaatgggaaaggattgatgtgataatgattccaaagggcccctttatgatgaaattctaaatacgcaaaatcccattaaacctgtggaagtgcatgggctaggtacattgaaatgacatatcattatattgggtatagtgtgcttattatgaagtgtggtataattgaaaattattggtcgtattagcaaaaatgaagagccaccaccctcataaattcagaggttatggcctggacatttgagataggagtggtaaaaatattctgtttataaataatgaaaactttaaaatctgaccccagaaattgctccaataaaaatctcatcgctaacaacttttagaactcttaaagtaatcgtggaaagagtttcataaaaacaatccctaaagacgtgtgttaaatgttaatctattggaaattcaaatagtagtctaggatccagagctcctaaaagctgaccacttgatgcttgtaatttggaattctaaagggagttgaggcaagagacccagagttctcgaaacaattagccttgtaatttaaggctcacttggctttctcccaaaataaaagaataagccttcttttttaacttgtaaaattacttcaaattagcattaaaaattttgaaatatccagggcaggactgaaaattagtgaaataacaggtttccatttagacccttttcgtacagatttttaattgttttattctacaaagtaagtggttttgaaaaatcattgtacttcacatacttcttatcttattgaatggctgctagcttcacactgccatgcctgaacagctagatggactccactggacctcaggacctgaaatgagcatattcctgtggaaaccaactgagtcacttgaatttgacttttaaggaaagttgtgtttaaaaaaagttgtggaaaactaagaactataaactatcactgagagccaattttgtaggatcagtgaaaagcacttttatactcttacattaagaaaaaaaagtatctgaatatgttcttatttctgtgaccttcacagaaaatattggaagtgaagtctgtagaattacaggtttacatttattttaatttatttgaaggtttgaggagcaattcctgttatttaaaatagaaataaaaaattgttattcgcatttcatgtgatagatgtgttcttttataactacccctcacccacccccagcactattttatacatttgaaaactgaattttataaaggacattactttgttctttaagttagcagtatagttaaaagtacatattactttacatttattacccattttgcattatgttttatgctcattttacatttatattacatacattaatgaagcacagaaatctcagctgttgtccttatggcaattctgttcccacataaatgagttttcttcattcagactcaagtgtcattttggggtcctgtggcttagccaccatgttcctttggaaaactatagatcttatcaaaatatttattgaaattatatccaggcctcaatttctcctttgttttgtagccataaaattgccagtttaggcctctgtttctagcattttaggaaatccaagtaaattatgtcccatcagtaacctcattcacagtttaaggagcttgtattgtatgaatttttttccttttttctaatatctttatcttgcagttaaagcttttgctttttccagatgaaattctgcatactaaaaagagattaattgaccctttgtttgtttttcctccaggtcttttacaaaagaaaaataatcctgtctttatagatgctcttcttacagtcttactgtgtgactattctctgacgactttccagggtctatactacacctttttctatagctataaggccatcagtctagcgtattgatcacaaatctagtgatttgtgctaccattatggatgattttcataaagtctgtgtattatgattcagtctgtgtaccttgcaattaagattctttttcttaaccatattagacttctatcctgtttttctactaaaagtgcattgtaatctcccaagtaatacttgacctagtaagaaagaaaatatgccaagtttactcaggattcctgcttagctagcagcgccaccttaccctccaaattgccttaattacccaccttcacttattctgtgagggggtgctgtctagaacaaaagaagggttgagaaagggacatggatgaaattaagaatttggtggcatggtggaatcatacatttaccccttccattgaaaatagaataatggctttttattctattatatacacttaactgtgttcatccatccaacagtatgattactcaacactctttagtgattttgtttcaggtatggttgctgctcaaaatcaaggtcttgagataagtaggaacataagtgatcccaggaaatggtagagtccatttcctcttatatgagggagcctctctaggctacatggaaaaagaaaatagaatataaatcgaaacgggaaagaaaaggtagttagaggagttaataagaaagaagaaagacacttgaacagcgttgaaagtaaacgttctgagaaaatacagctttacggatggaacctcgcttatctctctggcgtcatcttggttcttctcttgttcatgtcctggccgaattggctttgcctggaatacccgactcccaccccattgaaattatgttctcatgtcacatatccagtttgtaattttgtgtgttaatgtgtttgtttatttgtttgttgctttttttttttttgagatggggctcattcttttgcttaggctggagtgcagtggcgcaatcttggctcactgcagcctcgacctcccaggctcaagtgatcctcccatctcagcctcccaaggatctgagattataggtgtgcaccacaatgcctggctaatttttgtattttttgtagagacagggtctcaccgtgttgcttaggctgatctcaaactcgagctcaagtgacccacccacctcagcctcccagagtgctggattacaggcatgagccactgtgccctgcagtgtaatttttaaaagtctgttttcttcactagtgtattaacttcaagtgggcccaaatcatagctgttttgttcttcactaaatctctaaaacttagcatgggacaggaaatacacatttagtgaccaaatagtaaagtgctagtaatatgtgaaggtgctgggaaccttactttgggcagatcagagggcccatgtcagagagttactagactggaaagtaaatcaatctgtccaaggtcttctgacccaggttaaggattttgtgtgtgggtgagagagaagtggggcagttatgtgtgtgaagaggctggggacgtcattggaaattttgaacagaggaaagactaagcagtattttgagaagattgacttggttttctttagcatataataggccagtgagaacagagagagaccaaatcagttaggagcccttgtagtaatgaagttatgaaggtctaaaagcctgctctaaaatggtataaattagactagaaagaagaaattgatccaggaaaaactgcaatggaagagtttaaagtgattaaggatgacgatgacctacggaagcaagggaaagtagtcagagataattttgaatgttcgtgctagataatgttaagggagacaacaccgccaccaagatagaaacttttatctacagtatgacctcaactatataaagttatgtattgaaaaaagtagatgtagatacatcttaacatgtggacaatcattgttttgggtggtgggattatgggtaattgtctttttgttttcctttttcttgaatttagaacattttgtcaataagcacctatgagaaaatgacacacaaagaagtctgatttcaaatattttggcctagtttcccagttctacctttcacagcaaaaggagtcaagtatgtgtttggagttgagcttgggcagagcgaaatttaaaggttagggatcatctgcatagtgtaggaatagttggattcctaggggcaaatgatcacaggtgggcaggtggagaggcagtttgtctggaaacctgatgtttcctctgaatctcgttgattttgcctccagatcttccaaactggaaaatcccaatcattttgtagctgtgcctcatctttactacaagcatctgtttttcctcctacttcttagcttggtcttgattttatgctttcttctcctttctccttacattaagattgtagtcttcaggtcactggcttgcttatacttaaaataattttgaaaactaaggactaccctaacattctcatatgctgagttacttacgaatatcttacagcaagtaagtggcagagctgggattagactctggccctagagactctgtctttaatctggaagacaacgagcatcttttaaaaacactggaaacatgaaattgttgctttctgtcattattttttaaccttaactgttgtttccactccttttcccccaaataacattaccataaatgttcactggaaagtcttttatcactcaacatgcatgcctacaatgaaaattaataaaatatttagaaatagaaattttattttaaaaactgtcatcacagtgataaaatccaagcgatataaatattactaattttaacaatttgttaaacataaagtgggtttttgttagaaatgtatctgtcagtgaagtatctgccggtgaaatagttgggactataaatttttttcttctcagattagttcatgtatccatggatgaatagtacttattacaaaaaagagaaaaggtacactatcagttctagtcccaattttcatttctacagctgtaactgctgagacatctgttcacatgaatacatgggactaggaggtttgttaccacattgtcattcatttcttagaagtcatttcaagttatatgccaaaaattacacagcacttgattggtttgctaaaagctaagaaattgaaaccatcctacgtattactcagatattgttatagtcatttctttttcaatttatggaaaagggctttaagaaattatatcaaataatgatttataatttttttttttggtagatacagggtttcgctctgttggccaggctggtctcgaactcttggcctcaagtgatctgtcctcctaggcctcccaaagtgctaggattataggcatgagcgaccaagtcctgccctataaatttaatcgttagtcttcagtttagaggcatgttgtttatccctgtatacccagaaaagattgagaaaataaaaatactgtattagtttttaattcaaataacttctgcaatttttttttaacaaaatgcttttatcttactgttgcagacttagctatcttaattgatgaaaatttccaccaggtagcctaatttgcaaatccaatgatatggtcaaatgatcatatttgatcagtgggactgacaaatttgacttaatttttattagaaaaagctgagttcacatttcacttcaaataaatgcactttgtgaaaacttataaaaacatatcaataagttatggaatgcatcttttatgatacattactaaaacagtccagaataaaatgtggtgctagtaaaatttatttattcagcttataatacacatgctatttctctttacttaattagtaattatgtactataatatataacttatttatgaaatgagaagtatgttagaagtcatgatatcactttgataaatacggttccatgtgtatcacacaatttagtgttggactttaggaaaaaattaggtaagagtaatatataaaaatatttatcaattttgctaggtatcatgaccaaactgtttttatatgcttaatgaaagaggaacttacatacttgctaaaaattaagtgctttgacatttggattataatttattctgttaattttattagcagtatgtagaaggtattcaaaatcttttaagatgaaaatgatgattaatggtaaatattttgctattatttgattatgtaggctgtaactaccttactaaatgataaacatagtttctgaaagaaattaggtaacatttctatccacaccttttattcagtgtgttctacaaattttgtagggacaggaaaatattcaaactaaaattaaaagagtgggcatcacttacatttgcttaggggcttttcttcccaggtgaagacgcctcctagggatgaatgagtgttgaggatagttgaaaagaatatcttagctttgaatatgtggggttcgaggagggagaccattttcattattggacactcatgctttgctcccataggatgctttctaaagagcaatacattactaaaatagataagaatgtaagaggagagttcattatcattgcccattttacatgatgtctgaattctgaacattccagcatagtcctaaatcctgtatgagatctagctacactttactcatctgtgtatagtcagggaaatatgagcctttattaattgttttttttgtttgtttattttttgagacagggtctcactctgttgctcaggctggagtgtagtggctcagtcacggctcactgcagcttcgacctccgtgggctcaagtgatcctcccacctcagcctcccgagtagctgggactacaggcacgtgccaccatgctcagctaatttttgtattttttgtagagatggggtttcaccacgttgcccaggctggtgtcgaactcctaggctcaaacaatccacctggctcagcttctcaaaagtgctggatttacaggtgtgagccaccacagctggcctattaattcttttaataatcaaattgtgaattattttagcactcagaagagttttacaccctgggctagtgtaccatatagaatataagccaagtatctacctttattttgtaaagaaggaagggtacaattttcagaagagaaacaagaatgaattcatgtacttggaggcccattctcaagtggatcagttttagagtaaatatggaactgcaagatctggaaattgggtccttgtgtttgcatacctcatggaaggcctttttataccctgagcttaggcatactctactgagaagtccactgaattaagtcatgtcccagtggagtaatgcaaaaatgccctgctctcttcacttggctctaagccatccctccccgtttctatctccaattttcagtgtggtatgtgagtgggggcatatgtgtcatgatcatctggggcaattttcaaaggctgtgggttttgtttttttttttttgaggcggagtttcactcttgttgcccaggcggagtgcaatagggcagtcttggctcactgccacctctgcctcccgggttcaagagattctcctatctcagcctcctgagtagctgggattacaggtgcccaccaccatgcctggctaatttttgtagttttaatagagatgtggtttcactatattcgccaggctggtcacaaactcctgacctctggtgatcccaaagtgctgggcctcccaaagtgctgggattacaggcatgagccaccatgcctggccacaattttcaaagttaaaacaaccctcttacttctgaactttcctgcgttggttggttctggctctgtggccaaggttcatccagtaccttcaccagcttttgttcctgctggataggtgtcatgtctcccatgtgacaactattgctttaattaaatttctgcactcttatcagaattttacatctaaaactaaaaatcatttttatcttttaatcttttgctgtttagagatgcggtctcattctgtcatccacgctggagtatagtgcaggatcatagctcactgcagcctggaactcctgggctcaagtgatcctcctgtctctgttgcttcaagtaactgggactataggcttgctctaccacacttgtccttgcctggctcgttaattttttattttttttttgtggacatggtttcactgtgttgtccaggcagatctccaattcctatcttcaagtgatcctcccatcttagcctcccaaagcattgagatttcaggcatgtaccaccacacctacccattttcctcttataaaatgtttaatactttcctaatcctattaacaagaaataaaattataagctttccacaggtctttgcctttataaatacagctccttacttacagtctgctaatctgatctttttggactaatttccaactattttgctgcaagtgttacattctttagatggttccctaacacatacccattaattcagtgattctcagagtatggtcctggccagtagcatcagcatcttctggagacttgttagaaatgcagattcttgatgcccagacccagtgaatcagaaactctgggggaggtggcccagcagtctgtttcaacaggtcctccacttgattctgatgcacacaatgagtgagaatcactgccttagttccgtctacctacagtagtctcctcctcctttcttgcctgctgacttccgagttaggagactgcattcccggcagcattgccctctcttctgtgtcccacagtactttgtcaaatcttttttatggcatttatattgcctacatctgtctgcttttgaaggtggaggccacaacataaattacttttgcatctgcatacagcacgtacctcagagataagttaataggtgctggtggataaatgaatgtatgcatgaatgaaggaggagagcattttaggaggagtggtgatcaataaggtcagctgctatggagagactgtggagaataatgaaggaaaaaagctattggatttcacagaaaggcaggtgttggtgacctttgaaatgcttgcttcagcagagtgatgggcaagtagcccagattgctggcagttagggacttccgacatgatgaggacttgcaggtttcatattgactatttattcgaacatgtggtgaaaacagaattttcttgaatgaagttgctaagtgaccttaggccagttacctaacctgattgagcctataatctcagaataagcaataataataatactgtgtttgtatgctttttaattgaaggattaaatgagctaatagcccctagaacagggatgtccaatcttttggcttccctgggccacaatggaagaagaattggcttgggccacacataaaatacactaacacactaacgatagctgataaactaaaaataaatggcaaaaaaaaatctcatttaagaaagtttatgaatttgtattgggccgcattcaaagccatcctgggccatggtttggacaaatttgctctagaatgatgcctgatatatagttgatacttaaagggttattttctttatactcttcctcaccattatttttccttattaatgctgttgaaggcattcgtccctctttgtaaatccgtataagatgtgaaattgtttagaatactcttcattccattcattgcagaaattgtgaattgcattcagcctggaactaacatacttttagttgaacaccgaccactactttgaaattacttttttttttttttttttgagacggagtcttgctctgtcacccaggctggagtgcagtggcacaatctcagctcactgcaacctctgcttcccgggttcaagtgattctcctgcttcagcctcctgagtagagtagctgggactacaggtgcgcgccaccgtgcctggacaatttttgtatttttagtagagacgtggtttcaccatgttggccaggttggtctcgaactcctaacctcatgatccgcccgcctcaacctcccaaagtgctgggatgacaggcatgagccaccgcacctgacgttgaaattactttttaatcagctagaaaagtacctcaaagggtagttgtaatagaactcttttagttccaacttacagaatgtgacttcaagtagacagtgagaaaatggcagaggggacagggagaggtagtggagggacaaggaaatacagattttgttggctcatgtaacagaagattccagggatagtaccagcctcaaagcactgccaaatcttctcaatcaaacaatattatcagtactagatatttgtcagattgtcttgcagcctagatcttcttcatatgatttgcattctcaagcatattcattaggtacaaatttagaggaaagagaagaaattcccagtagttctaagtaagttcctggattcaattgcactgtccagacttaggtcacttgcctattcttgaaccagttgttatgctcagggtgctgggagcagactggttttctaggcctggctaaggagtattcagttctatgaaatactggtattgtctgagtatggtggctcatgcctgtaatcccaacactttgggaggccgaggcaggtggatcacttgagcccagaagttcgagaccaggctgaacaacatggggaaaccccatctctacaaaaaaaatacagaaaaattagctgggtatggtggcatgcacctctagtcctagctgcttgggagactgagtcccaggagatggaggctgtggggagccgcgatcctgccactgcactccaacgtgggtcatagagttagaacctgtctcaaaaaaaaacaaacaaacaacaacaaaaaaaaaacagaaaagaaagaaatactggtgttgagtgtaagggacaagttcccaaaaggaaatgtagcttctattaccagagtgaaggggagtggacacaagtcaggcaaaaaattggtatcaactcactatagagaaaagggcttttcaaactgtacttaagcaagtacagttcagcccactgagatacttaagcaagttgaagagaaaaagggagtaatacctgattggatgttctctgacccatgattactccagcttcacctagaacagcttcacttttatatattttgtatatgcaacttctggttagattgcatttggaaatgaatttttttttttttttaaatcctgtgacagagtctcactctgtcgcccaggctagagtgcagtggtacgatctcagctcactgcaaccttcgcctcctgggttcaggtgattctcttgcctcagccttccaagtagctgggactacaggcgtgtgccaccatgcccggcttatttttgtgtttttagtaaaggtggagtttccccatgttggccagcctggtctcaaactcctgacctcgggttattcgcccactgcaacctcccaaagtgctgggattacaggtgtgagccacggtgcctggcctgaaaatgaatcttaacaataccattggtatgggacacatcagcagatggttaggcccataatatattaaagtaggtgacatcttttcccactccatcctgataaatgagttcttgacctaccttttccacagcgccattggcctaactcatattcctaaccctacaagatccagacctgactcctccacagtcagatatgtgaagatcatgaaattaggcagcagtctagttctcagcttacagattttatgacacttaaaaaatcatcatgtatcatagttccatggatacttccccaaaagttgtcacaacttggtgactcgatatgatctagtaattataaagcagaaaattttgatatattcaagaaatttgacagatcataatctttgatgatatgtttatgctgaaatttgcaagttaggcagtttaatttttttttttttttgagttagagtctcgctctgtcgccaggctggagtgcagtggcatgatcttggctcattgtaacctccacctcccaggttccagcgattctcctgcctcagcctcctgagtaactgggactacaggcgcgcaccatcatgcccagctaatttttgtatttttagtagaaacagggtttcaccatattggccagaatggtcttgatctcttgacctcatgatccacccgcctcagcctcccaaagtgctgggattacaggtgtgagccactgtgcctggcccagtttaatattttttaagtcttcatctatggctcatctcctaggtaactgcttcctaaaccacactcttagagcttttttgtgatctactattgacttccattaaatatctagtccgccttttcatcgtcctcagggcccaaacaaagctggtgaggtgtctgtttgtgtaaataaagtttgtttgtttgtttttggagacagggtcttactcttctacccaggctgaagtgcagtggcacaatcattgctccactgcagccttgacccccagggcccaagcagtcctcccccatcagcctcccaagtagctgggactacaggtatgcctgcctaatattttatttttttgtagagacagggtttcaatgtgttgcctaagctgatctcaaactcttgggctcaagcaattctcctgccttggcctcccacagcgctgggattacaggtgtgagccactgcacctggcctaagtacagttttattggaacattgacacacctaatagtttaagtcttatctgtgtatggctgctttcttgctataacaacagaggtgaataggtgtgaaagagaatgcataacccacaaacctaaaatatttaatatctggcctttatagaataagttgttgacctttgctctatatttatgtggtttataacagtttttctacttttttctttttttttgagacagggtctcactctgttgcccaggctggagtacagtgatacaatcatggctcactgcagcctggatctcccctgggctcagataatcctcctactccagcatcccgagtagctgggaccacaggtgggcgccaccatgtccagctaatttttccattttttgtagaggtgggagtttcaccgcattgcccaggccggtcttgaactcttggcttaggcaatctgccgtctcgcctcccaaagtgctgggattacaggtgtgagccaccttgcccagctgtattcatacttactaacatatggtacacttatgaagaagaatcaactagtgtccttataatatcctcagtctcaggtgttctcgaaagcatatctagggaaatatttttgttctttctgtgctcttttaattctcttttcttctgtacccttaacagtttagtgctcttcatctttaaaacaaccaaccttggccgggtgtggtggctcatgcctgtaatcccggcactttgggaggccgaggcgggtggatcacgaggtcaggagatcgagaccatcctggctaacatggtgaaaccccgtctctaccaaaaatacaaaaaaaaaaattagtcaggcgtggtggtgggcgcctgagtcccagctagtctggaggctgaggcaggagaatggcgtgaaactgggaggcggagcttgcagtgagccgagatcgcgccactgccctccagcctgggcgacagagcgagactccgtcttaaaaaataatacaaaataaaacaaccaaccttttttaatgagtgggagggagagtgattgtggtttttttcacctacaatttgaacgcatttgcacacacacctgcatgtatttaatgcagacatgcaaggtgccaagtacacacacaaaaatcaggattttgtgtcattttatttcctttctactgactcctgtcagtttcatatttgctgttgtcatagaagtctgttttgtaaagaactatctgaaacggttgaggagagctgatgaagggaaatggaggaggagcagatcgcccccgatctggtcactggattctgttagcagagcagccactcatcagaaggctgagtagttaagctgtacttgaagaagaacagggatagtaataccccatccctgcttttttgcagtctaaatgccctgtggagtgagagaaaacttcaatccctaggcttgtgaagcccttatctttcccaaacgttaaattaatttttaaggctatttattcaaagttgacttaaccactagaatagggaagatcagacaaatcagctgcaagaaatgaagtatgagaaaacccgaactctttgacaaagtattcctgggagtaaatgtgttgaatgaagccagcgggtaaatgataagggcctttacactgtggatgtaagaaagcaatttatcaagagtacatgaactctctagtgaccacaagtcaggaggaaatgagagtggaggaggagccctgaaaaaatacatatgaaatactaaaaaatctgtgtgcacgcacttttaaattcctccatgattatgcagtaatattggtgtagtaaaataggagttgctgagaatgcacgtgtagtgtagcccgtaccattagggataaggtgttaggaaaagccgctgagaaaggccacactgtagtttagaatttgcagaaaccttaggttcataacttaggtgtagttatgacttgagcctagatgttggctgatacccatttgcctgactcatgaggttagatgaccatccttcaggcttatgtgttcatcttgtttaattcctaaatgggcatatgcatataattctgacagttttgaatgccttttgtgttctcttaaggagtttagagtgcctctcactcgttatctcactaatctttgcagcatctctttaagccctacagataagacagtgttattgcttgagaaactgaggcaaaatgtaattatattatcagcaatagggtgtgcagtaactcagatatggatggggactggaatttatgaccttattttggcctttagttctagagaagagatggcgtttcttaaatttgaggagaaaaagcacccaattgttgaacttttcattttattaaaagtgtttactctgagaatggtcatcctcagctttttctactgagataatacagttagctgaaatacaccagaaattctcaaatgttggtttgtcatttgtttccattttcatctgtacccttagagctattaacaaagtgacttgttatttctttctttttaaaattatgactttaattttcttttttatcctgaataactttcagaaaacatgccaatgaacacaaaagctatctaacaggtgactaacgagagaaattgagagaactaagtttttggataaccccctatagctaatatgacttgacttaaattactagccctccacacagatgtcagctttccttattccctccaaattaggtctttcacccctgtcgtctaaagaacactctcttcctcctctttaaccattcaggtattataaggggtgaatcttattcagaaaagtgatattcactgagcctgcccatatggcatgagttaggaattgttttgttttgtttttggtggggggtaggggacaccatcgtcactcgggttgaaacacagttcagttaacaaatcaatgaggtttttagcaccagccacggtcatttgaaaaccccctcagtgactctttatctgaaagttgaatgtgttttctatttgttgttgcctgcaatttataaacacatccaattaaaaaaataggaaagaaaaggggtaaaacagaaaggaggtgtcagagaactattttctttgcaagatcttgcttaaacacctatggcgaacattcatgtgtagaaatggagccctggtaacttccagcaatatttctaactcctgttctctctctttatcttattcccaacacccccatctctggaactttggcgggaccaccacagccttggataagctcagcacgcagcacctgtaccaccccacccaagtggagattgtgcagtccaacgtcgtgtttgacatcagcagcctgatgctctatgggacacaagcagtgcctgtgcggctaaagatcctgctggaccgtctcttcagcgtcctgaagcaagaggaggtactgcacatactgcacggccttggctggactctgcgggactatgtccgaggatacatccttcaggtagggagaggacttgaacgccgcccgtgtccggggccgactgtgggtggggaagggtgagagtccttgacaaacctcgcaggaagggctgcacaccctcctctggttaaagtggtcgtttcagcaggcttgtcagggaaggggaaaggagagagacaaagcaggccaccatcgggcctcaggctgtattagaaggaaaacttggcctcttgacttgcgttacctttgtttgcacctttttgaattcaactctttctctacatcatgggctttctggcttcttcaacaagtcttattataaccctattaaaaaggagggctctttgaggcgggtaatgggtgtgtgaaaatctgagattacccttcatttgggtttattagggctttttctcatactcagtttgcaggtacggtgtttttcttggttgtctttgtacctaaaggtacacattttactatttattgttttttcagccaactcaaaggtagaactataatccatataaacttatataaccagtaaaccctcacatgatagccttcagatttctaccttctgaaacacacagacatgattttagatttcgtctttgcagaacctgttcttccagccttgagtgtctcctttgtgtcaatggcacttctgacctggtaagggctctaagagttttctgggaggcccacagccttcatgcacccccatctcccatccctctctttcttcatctcatttttgcaatgtgtcatgtgttatttgcactgtatactttgcctctgaaatgtgtttatggctatctgtcttcctgtaacccttgaggggtcaatgttgagaacagcattttgggagatcccaggatccaaagaggctacactggatgatgaagaaatacccctctcgccgaaggacatctcaatttgagaaggtagaatctgaagcaatttttcaaatttcccatgaggataataccaggagacatgaccccttcaaaaacaattggttttggctgtgccagccttgtatagtgctagacatatctccactgtttattccctgagctactgtgtgttacatgaagggcattagctgccagcttggcatgtgaggagtggggagcctcagtctacctctcgttttaacctggcatcagaacacacagattcttgtcattttcctgtgtggtacctccagctgttagctgggacaggagagcagtggaaggatagaaagtagaagtagggaaagggaagggagttggaataacctgtctgctctcagaatagaatgacgtcttaatttagtgagaatctcaactgggaagacacagaaaatttggccctcaaaagatgagatgatggtgataatagtagcaattatatattacgttttcagtttatacagaatgtttacaagcattatctcatttgcctcaggatggggacatttcagtgggttaaagtaggaagataagtcttggacggtcagggggcatgagggggaacaagatctaggaggaaggggccaggaaaaataaatcaggaactggtttcacaatccctgcttatactggccccaagatgcatacagtgctgcgtctttctacagtcatttctacagcgtgattattaatgtctgttttgaatggattttaccctacacaaagagaaaaacctcttacagttgtttgtatggaactgttagcttggctaacagtcctttctttattccaaaccaacaagtgttttgccccaatctggtaccatctttattacctccactatgctgcttatacttctgtcattaatattgtatttcagtttcatgtgtatgtgttgcctaagatacttacacctgtatacctacgcagagacacaagcatatacattgtatctttctgtccaaacaaataggtatgtgcagggctatgttggtttgccattttaacaaagctcaggtagcactttgataggagtaaacataaagcctgataatgtttctgtgttatggtcctattgttctgccttggccagtgcctgttttttattttacttgaaataattatttagatgttagtttttccccaacttgtgaacatatctctaatgcaggtataaaaaatgtaaatgtactctgtatttctttgtatgggagggcccagtatttagcaggggtgtcaaatcttttggcttcctgggccacattggaagaagaattgttttgggccacacataaaatatactaacactaacaatagctgatgagcttaaaaaaaaactctcataatgttttaagaaagtttacaaatttgtgttgggccgcattcagagccttcatgggccacatgcagcccgtgggctgtgggttggacaagcttgatttaaagaaacaaaattgcaagagaaatgaaatttgagaggaaaattcagtaaaaccaggaactaaaatttataaatctcttattttagggtgaaatactgcttatagagagcattttcatttattgtaatacttaaattataattaatttttattattttaatatagattttgacagtctcaaatttaatataatatttctccattcagtctaaaattgacattttgagaaaacgatagatgatttttacattagaggagttctaggtttagtttctgtcttgttttattggtagaattgatgtaatatagattttatttaaatgatggtttttgtcattcagcatttataatctacttgttctttgttaaaacagttctcggtttggaaaaaaaagcaaatggtcccagaacaccaaaactgttaccacttttgtagtgagaaaatgctttgttttgtaaagaaaaaagagagagactgtaaaagtaaacccattcttctaaagtaatgttacttgataattggccaatattttaaagattgtatgtggtaatgataaggtgtgcacaaattactttgaatataattgtatatggcgtttttgtaaaagtaggctataaaatgtgtgtccgaaggctgtggaaccccataatgctctattagtgtacaagtcattttatctggctaaaactcaattgtcttgtagccctcaaggcatcaattttagcattattgctctcaacaacagtatattgaatattatgtcagttaaaggagaataattatcaaggcaggttagggtggctgttagtcttaccacatattgacttggttagcagttggctacagattgtgttcctgggcaaatgaagatgtacggtaagttgaactagtcaagccaggatattaatttaactctctgtgggacaaagcctgcatcctttatgtgtacacagctactcctgccttctgagatacctttaaatgtggaagaatgacagttgtctgatctgattttgaatttttggatgtagggggaagaggggagcagaactttcaaaagtatgtggtttaagaggttattattagaaaaagggagatgatagtgatgctacagatacatttaaaaggctggcacatcggtcaaggatcctgtactttttttataaagttaattttcacctatgtgagtgtctatataattcacaagctagccagttgggtataaaatgcataacataacttggactacaactacttaagaagtcaggtaatatattaagaacccaatattctcctgtgtacttattaaagtatttattcagaaagtacagaaagttagcttttaagcattttccagaaaaccacaaaaatgggaatatgcaattagatgataaaatctaaatacaagggagaatatgatgtttttctactactaaagaataattctggccaggcgtggtggctcacgcctgtaatcccagcactttcggaggccaaggcgggcagatcacttgaggtcaggagtttgagaccagcctggccaatatggtgaaaccctgtctctactaaaatacaaaaattagccgggtatggtggcatgtgcctgttaacccagctacttgggaagctgaggtgggagaattccttgaacccgggaagcagaggttgcagtgagccaagattgtaccattgcactccagcctgggcattgcagcgagactccatctcgaaagaaaaaaaaaaaaacgaagaagaagaagaagaagaattcttagttcaggtctgtatcttgtgatacatttattgaccatgaatggaagcagtggccccctcttttgtcctttccccattttcccctctgtccttgacctaggaaataagaatacgggtgattatcattgttgaatttagtcatttaaaaatcaagtttttatagtctctttcagtttgaacgtataactgacttgcctgggctcatccaccagcctgtctgtggaaatcttctcatttgcaggtgggtcctgccagaattcagagaagcagttgagacactctgaatatttagctgagatgtcaacagccttataagaagagtggtattgatgcccctctcaactcttctgtgtcttaccagcacaattggtacattagaagagcatttctcaaagacgaatggggccatccgtcttttagaggtccagctttagatttgggagtaactacatactggatctttctcttaaccttcatgatactcattagtataacacaggctctgaggaggtctagggtacgagcctgtaagagtagggaagtagctttctccaacccttcccacttcataacctcttcccttcaagctcatttgaagtacttagttctgaacacactcagttcttctcccacatgagctatttgcatgtaaggtttcttctgcctggaataccttacttgtgtctctgcgtgggtaatttcttctcttctaggcatcagccaaagtctcactttcttacagaggaccatcttagccaatgtaggtcttttgtagtgtagctatatcttaggactctgtttccttcaaactcctatcacaatttaaaatcagtcaattaagtcaactgttaaaatgtttatttttctggcctcctcactagggaacaacacaaatgcagagcactgaataagtatttgttaagtgaatggctagggaaacctgtttagcttggtatagcttgatgtttcaccatggaactcatggaataaccagtaacttcagtttgtcaaaaggcccttagttttttctccaggcttcctaaggactgactgctatagcagcagctgggctgttgagggcaataagaagaaaagtaaaggctcccatgccttctagctagtgatctgtgtagagtaagtgttttatggtatccatgtggtagaaaacatccatattaagcaaacacttgtatttaaacagctctttgcggagcaagttcatgtaagttacctcttttcctcctcttacaccatcctcttatagatgttgccaatgaattaacatttggtatagttgaggctcaaataagtgactttcccctgatcacagaagtgttaattggcacagttgatacactgtaagcttcctgaagataacacatgtctcttattcatcactgtaactcgcttcccagcaccagcacccaggcttatacataaaagggtgtattaaatattggaaggaggatgttttgaagtttgatttgaattcaggtctttgactctatgggcaatatttggatgtttgttttttgtttttaaggctaccagcctgtctttccagaatgtaatatgtgagagtctgtagatgcagtgtggcatgatttgggggaagagaagaggcctgagtctggaactgacagactaacttaagatctcgtatattcagtggcacaccaaatgtctgaccttaggtaaaattgggtgaaatggattcctctttcgtgttccttttcttgcctatttcctgatactccattttgttatctttacttctattcgctctcatttctgtgactaaaaccagatctggtatttatccttaatgctttattgtaaattccggtctttgacttggcctttccagggatacataccttttgtagttgagcataaaaacaaaggttttgtacctagttagtaagatttcagctataccatgtgcagggattggaagagagatgaagtagtctttcctgggtttataaaagcatttcaagttggatggcaaaagggctctggatattgagacaagattgggttaaatctggaagactttgccattcttagtcatagtttcttaatctttacaattaagataactccccatacctctctaaaattaagataaccttcatgtctctacctttgagtgtctaaaaagatgaaataatatagatgaaatgtatgttgtgaactccttctcaataaattggcattttttcacttatatctatgtgtaaagttaactctgagtaattataacagagaaatatcagttgctaaacatgtttctctaccaatgccaaatgtttaaaaaaatagggaatgcattttaggcgttagtatcaataagataaattgcagttgttttagtaagtacatcctgaaatactactagtggcataacacagcagaagtttctcttttctctgcaagcctagtctagtggtgaatgctttccttccataagtgatttgacaagaggtaatttagggctattgctgttttatggctctgccattttctcggatcgtagattcctcatccaggtggcaaccctgagagaagatgaaggttctctgtgggatattttcatggatgtggctcagaagtgtagtagggtgcttattctcccatcactgaccagaactgatttgtaaatgaggccatgtgactgagaggaggagccaggatgtatgggcttggcaggtactctcagggaaaatgagtacaggtctgtgctccactcatgtgtggtggaatagctataattatgccttctttttatagagttggaccagaaaagcttaatgcagcagagtcatgcagtgaaggcagattcatgggcttgcatcctggcttcaggtcttactagatgtgtgaaaaaattaggcccgtgtctttattcacctcagttcactcacctgtaaaacagggataataatagtactcatggctttgatgtgaagacaaagtagaatgattcacagaaagcacttagtagtaccacttgctaagtatccaggcaatgctaactattaatatgatagtgaaaaagatgatgatacagactgttacagactactgccaacctgatgattttagaactttgtttctataaagtagccttaaatcctggatttcactgtacctcttagagaagaatccctttctaaccagtagagaaaaagagcagctactatttaattatcaataaataatacatacacatacacacgtatatatgtatgtacatatgaatgtacttggatataaataagaggcaggagtatgcagtaacaaagactttgtacttcagagttggacagacttggttgtgaatcttggtttcactttttggtagctctgttagccagcagagagaacatacttgaacatcagtttcttcatctataaaggttaaatcaaagaatattttaaaagtatgtagtgcaataaccagcccatagtactcttattaatattaacattactacattgtgaagatgtgtattttcatgtgtgcattttttaaagtaatggtttattcttttttttttttttttgaggtggagtctcactctgtctcccaggctggagtgcagtgacatgatctcggctcactgcaacccccatctcctggattcgggtgattctcctgcctcagcctcctaaattacaggtgtctgccagcacacctagctaatttttgtatttttagtggagatggggttttaccagtgttggccaggctggtctcaaactcctgacctcaagtgaaccactcacctcggcctcccaaaatgctgggattacaggcatgagccactgcacccggccaagtaatggtttattctatatatgacactgtcatttttatcacctttatatttccctattttatcaactcttccaatactttccaagctctggcacagaatgaatgattacttgatatatttgtttaaatgattagagtatctaggattgcaccttatcgcataaaataaaacatttaaaacagcctttgaaataggtattatctgacctcacaggtttttaggaaatttctggagcagaaagatcaatgaatctagatataaattaatttaggtaatccttcaaatagcaaaaaaaattgatttattggtatatattgagataggagatctctcagaaaaccagcactctaatcggtgagctctaaacaaatgatggaaagttgtattatataaactacaaaaatattcagatcacccagaaaattgacataaaggggggattatttgataccaagtaaagattggattatcaacaccatgacataaggaaggtgtcgctgcattatgtcaccaatatgtgattctttttcaggaaagaaggatcacatgtatgattggtcaggatccccctgtctttggcagggatatacaaaaaatagatgattcagagcagtgtgttgtatttatagtgtctgttttctaaagtgcttggaccactctacaaacactgtcctggcaagcctcctaacctccctattagagagatagtttcagagactattatccttggttttaaagttaccgtgatggggaggcctcaggcagaggcaaagctggaagtggaatacagggattttgaatcccatgccaaagctctaactatttgaacggcaatgaaaataaacaccttagatccaaggacaaagcttgatgttttgtgctcagagttaaaatgaaaatattcctccctttactcttgcaaaataaaaatatatggcttaccagattccaggatggaatgcagtgactgccggaataggatttgcgcctgtgggacatgaagaggcttttgcattcccccaggaggagcagaaatgagtccacagctcactggccagtctccatttgataagaatcagttcagatttacttgaaatggacattgtctgtgatggcactgattaaatcatatgatctcctgagcagcactcatacatccttcttgttgaatttaaagtggaaagctctgagctttgggtttaaaccttaattctagcaccaattaactctctagccatacaaaaagcacaaaatttctatgagccgtattttcttgatggtgccttcttaaaggagctttcaggatgaagagaagtaatatgttaaattcatagtggagcttagtaaatttaattcctgaagtagaatgatctcctagtccccccaccccaacccttaagtttctagagcaacgggagctttatgagtcttccagttgcccatacgttttatttgagctactgtgtccttttctagtatttcccccaatttgacagaatagcccagtggaagatgagggggacttgtacaggaatgaaatcctctgtgactataatgaagagtcatgagaaaactctcaaggctgagtcttagtctactatctgtttcttttgagtgacttacttcaagtgctggtgtatgaaatcttgaagggctgtgaaaagtagaaaatgagataaggatctgtgtgggtttctggaagcttttgctaaattcatacagatgggacaaatgcaaataaagatacatttatttgatttcttcatgatacctgtatgtaatgctgacggaagtgtaaaacaaaatgtgggccaatactttgctaggagaatgagtgaccatgcatggttaggccacatctaggcctgatgatctgaagctcttcttgatttgtctgatgtttgcatacacttctttcttagggaagtcactagtgattctgattgtttacaaacttggcatttgttgccgatagccttagattttaaagatgtggctaactagctagtgatgcatgaacaattgttttagaaacctaccattgtggtcctgttggtatctaggaagttttttcatttgttggtggcaactgagtgatctgttatgtctacttttcctctctccctgtcccctcccccatcttcttctctctcttttctttctctctttttttcagtcaaggtagacttgagataggggacttgcatggctatagtagatcataatacatgaggccccccaaataagagagtgaaacattgtctgggatgtattttctgctcgaactcatcgtcatttttctgtgtatttcttacattagcccccagaaaagcatttttcaaagactttgagaaccaaaggttctctctgtaaggaaatgtgttaacctgatttccttgttctcatgtaattttctctcttaaagccataataatagtgtcagaggcagctttctagttagtgtgagtaatgtggttactgtattttctatttttattttaatgtgcttttcctgctgtggatttttttttctttcttgattttaaaaacagcagttgagtaaatgtggttatttgaagactggcgtatattgcatcttctctgagatgcaattttgaaggaaggctctgtgcacaataggcattttttttcagattccttagtaggataaataggagaatgtttggaacacagatcagtgacaatattggtttatggtcatggtaggtcaggcttcctcagagaaactgacaatagagtatcccataggttttgtctctagagagtctgttaatatgaagtctgtttattttatgatgtgttgataagaaaattaggtaaccagggaagcaccttaaattgctgcattcatttgcctctttttaagcatgcacacacattgagaaattttgaattaacaacaacaaaatacacttaaattcccctggaaagagtaattaagagctacttgtctctgtgctgtcatctctgccagaattagagttcctgctgagtatattccattgagtcagccatcattccatcaccagcagggattgcttttctgcttttccacgtattgacatgtgagggaatgtctgtcttgcagtagccatgggcttgtgccagattttgagatccatagaggcagttctgggagcttttcaattctgaatcagggttccaattcataatagctgagccagggaaaccgggttgaatctgtggccaaaaccgtggtaaaaaactttttccccctttcctttcttgcagtgctttattgctttaaaatatgagtgcctctgtccattgattctctggtgactttccgttggattcaaattgtggtctcttaggtgaaaaggtcagtgtgttattcattcagccacacatcgatggagattaactgagagcagtacaagacatttggatcctgccagacctagggcacctgaaggaagtttatttcttttctctctagcctttactatgcctgctgcagaagaggatggccctgtcttctgggagtaggggagggttttgattggctgtgtgttaactgcctcaaatccatggccatagggcgagtaagaaccctggagaatcaaacatgtcatctttgtagcatcacctgatttagtgcttttcctcaggtctgagatgtctcagggggcctttttcccttgcagcactgatctttcaatgaggtgctagtgtctgtcctgagcaataacaaggaaaaaccatgaagtgtgaacagctcttattaggggggtaaatgtcattagcgcctttgtagccttctctgcaatctgaatgctcctgtcaaaagagcgacttactgaagcctcctttaaaatcacataaatggaatttaagatgctgaagttttacattttaattaagcaaggccattaactccctttacatatacacttttttgtagccagttatgcttgtatgccttataaggctattgaaaaattatccacaaaaattattttaaggatttgagaaatagttggttaactttaagtcaaagttttagatatagagaccctatactcatgtgcccaaccattgtaatatgcgtattgacgtatatgataggagaaaacactagcattttgagttaataagtaggtcagtttggattaatggaaagtttgaagcttagagtgtttaaataatgattttattcttttcaatacacaagtggaaatgtttctccagtctaaattccccctagtattctcctgaaacaaaatttttatatgcagatatttgcttcttttgcaagtttgagaatttcacagtaacttctggttaccctgggttgtgtcttgcagttaccaaaaaaaaaaaaaaaaaaaaaaatcacgttaaatagttgcatggttgcgggggtcagatacagaaagaaaattgtcttttttttactatgcatgttaatttttaataaaaatgaattgagacatctggttaaaactttgggaggtgcatctagaaaagttacaggtggtgaatagaagtttgctactcattactgctaatttaagatatataatttgatatattctgtttatttagtgtgtagtctttaaaatatgatcctctattccttttcaaaattccaattaggtcacagattttcctttccttttcctttcctttgctttcctttcccttcccttcccttcccttcctttcctttcctttcctttcctttcctttcctttcctttcctttcctttcctttcctttcttttcctttcctttccttcccttcccttccctttccctcttttccttccccttccttccttcctcccttcctttctcccttccttccttcctccctccctccctccctcccttctctctctctctccctccctcgctccctccctcccttctctctctctctccctccctcgctccctccctcccttctctgtctctctctctctccccctccccctctctccctctcttcctctctctctccatccctctctccctctgttgcccaggctggagtgcagtggaatgatcttggctcagtacagcctccacctccctggctcaagtcatcctcccacctcagcctcccgagcagctgtgactataggtgtgtgccaccacacctggctatttttttcactttttaattttttgtagaaatgggattttatcgtattgcccaggctggtctcaaactcctgacctcaagccatctgcccaccttggcctgccaaagtgttggggttaggggttacagacgtgagccaacacgcccagtcgtatttatttttccccacaaatattctatttgtttttttccccctgttttgaggattcaggaaaatgtatttattcaagagataactggtatattacaagtagtaaacagacagacaacatgcccctctgttacagctttcaatttagtggaagtggtatattataagtggtaaacacacacacaccatggtatattacaagtggtaaacagacagacaccatgcccctctgttacagctttcagtttagtggaagttggtgactcaggctaaattaagggaaaggggagatcactgggtatgttttctaatgaaaacgtaagtatgatctataattattgcagtcattaattatatgtaaatagactctttggacatactaccaatttacttgaaaagtcaatgctttaaggaattttaaacatttttcaactgtcttggttgtattttaataatattaattcaaactctgcaattaaatgactgactaacgtaaatttcaacctggcccccactttttgaattaaaaacatttatattagtttcagttactgagattttgctgtccattatggaaaacccacttatttattagattatagaaggtaagcagcaaaagatatatttccttcccattccttaaaatgtttcgacaagttaatgaaaacttattttaaaatttccttttagtgagaaatcaaagatgatcatttttagccccatcaggatcattttagaaaaactgcctgtgaagtcactcatttagaacgagacgatctctgtggaattgctgttgccagtgccacgtggggagtaattgggccaattaaaatgtagatgttttatattaagttgtggtgcctgttaaagtagagtaccagatttagaattagtctgtattccctttgttagtttccttcactcagtacatagaattttagttcatctgatagcttgactgataagtaatatatgtatataattaagaaggtgatagtctagtgccagtaggttcttctgaaaagcagtgtccaattggtaggacagtgagaagaaccttcaggcagtaccatctgctttgtcttctctttcctctgttctaccttacacctggatccaggctgttaatataaattatgattgctaaggttcatattttaggataactttgacaaagagacgtctggagtatcaaaattatcaaagatgtaaacttcttcataaatgtttttcaaggcaccagatggaaggaagctttactgtattacatttcccatatggaaaagtatctgggacctgaaaggggcacacccttagaaggagaacacttcttaaaaaggaactttataaaagaatgctatagtatagggttttcacgtatgatttattcacttgagcatattgctttgaaggcccaaacagcatcctgagcataagttgtggtttcctagacctaaggagtgtctgatagtttaaatttcacaaactttttagatttgcctatgccacaggtcaaatatgccttgctatgagtctggttgccatttattttagtcaaggtttggcttttgttaaaattgttgcattgggtttatgaaagatacatctaccttctcctacatgtgttattttatattaatagaaagtcaagatggtagaatttaaataccattgtggtggaaaaggtaagcattatttttctacagtgttctttctttcatttttgatatatatattttgtgatcattttcacttggtaaatattacataactattgaggagggcttgggaggatatgtggttctttttttgttgtccacttttttttacagcaataatatttctaaaagagtaatatgtggtttttaagaatacttttaaaagatttttcaaataatactatagtgtttcgagtgcgattcaaggaaaccgtatgtactcatgcatttcataacaccagacttttacagtgtacatcaaaagatagtcctaaagaggtgtattcactttgaaatgacattcagaaaattaaagcatattttcctgcagaataaatgtataaatggtatagacatcttctatccagggtagttgaaaaacctaaataattatgttaaatctggagcttctagacatgtttcaggaatatttttctgcttaggatgagctctacaatatgccatataattttcactttatagggtttatgagcaggatagtagtgagatttatagatgctaatatgttagtaacatttcaaatatttagttttgataaaagtaatatactaaatggaaggaattgcctctatatagccgaactaaccttgaggagcatacagttcatgagtaaaacaaacaggtaataaaaactgcttttgtttatagaaatttggtttaggacagaaactaaaatttggcttagataatgttcccataattttctcttatttccttccaaaatatatctttggaagaaagagcaaaaatacgaagattcatctgaaagattattatattttctcttttcatttaaagtacattattagcttgagttagaattctatgaaatatttatgggatatatatacaaagctttatttaatgttacagttattgtagacagggcttaaatacaagactgaaggagaaggggaattttttttctccatgtcaaacaggctgtccaatttatgaaaagaaagggaaaaaaataaaaacaaaaggctgtgtttttgtgagtcttaaattgtgaggctagaaatacatttagatagaataaaaactcacatacctcagcttattagtgattgacttttgagaccttctacagaaaagaattttgctgaacttcacaacaagaaagaccacatagggtattttagaccacttttattaaatttagttagcatttttaatttttccacaatgttgcatgcctttaacaaagtccattctgaaatatagaattgtctataaaagatttggatgaggtatagaaaggtatacaagaaccagagcaccaagggcgtttattattagtttaaagagtttcatttcactgaaagctgatttttttttaaagtgagtaaagcatatattagtatattaatagtggtttaaattcccagcattttattatttttcacaagtctgtgggtcagctgggcatatctgcagtgagctggcatgttgacctggggttggttggtctaggatggcccatttacatatctggctattaggttgttactggctgttggttggggcagtggagataactgggcaatttatcatgcgtccttcagcaggttaatttgggcttgttcacctgcagatagttgtagggttcttaagggcagcaggagagggcaagtccaagtgtgcaggcacttctaaagtgtctacttgcttcatatttgctagcatgccatcagccaaagccagtcacattacaaagcccagagctgcagtggcagatgactactccaggacatggataccaaagacatgagcaatttggggaccagtactgtaatctttactcacctgatttagtgtcttaggaagcttcatttggtagtggtatctatgtggaactaaggagtcctgagccaggatgtctggcttgaaagctgtcactgtagttcaagcagacataaggctggcatttaagagtaatggcagggaggataaacagcagggttagatacaactacttgctgactagatgcactagatgagggagaaaaaaaggtgctcataggttgattccaggcttcaagattgggtatatgggaatctaggaaactggtaaggttgtagacctaactatgtttatagtgaacataggacattcatgcaacttcctaaacaatttctattcctctgtccagaagtattaatatgaaagagatggaatctatgaaattccttttttgaaactgttgcttaaaaattacgccagtgctttctttaccatcagccttgcaaagatgtgtaaatgacaccaagtgttttctcccatcttttaaaaacatatgggcaacgttgccataaacaataaacccaaaagtttggatttcctagtttcatttctctgaactgagcagctacctaggatttttggaaacttagttttataggtgatgaagattatttttatatgtagaaatgtcaattgtgacaaaagttaaaaatttggaaatcattttattatctacagatctacagaaaaaaataggcagatttttctttccacctagatttaattttaagaatatgaatatttgattcatccacattttcatcttaacagatactgctacatgtttaaccaaaagattaggatttttgaatggtttgctatttagttacgtttcagagccaaagtataaaagttttgattttttctgccatttactttgtcatctaggttaaactcctccaaactgtgaatgttttttaaagaaatcatatctaggttatttatgaaaatatacaaaagccatcttcctgctgagtaaatagaaaactagtttgttcatggtttctctgtacttcttatagatgggtggagaatcatttttttgttaaagagtatacctacctacaaaagacgataaagagagatacttggggagaaagcaacttagtgcattatttgtttccagaagacaaacatgcaatttataatttaaattaagatcagggtacataaactattaagtatgataaatgacaatgtatttcaattttatattatgtcagtttagagagacggattaagggaaagggtaatgaaggaggaagagagacacagatttttagaaatgattttctcatgattttttatgatgtggttttgcaaccatggtacaaatcagaattaggttgcacagttagatgtccattcctgcattactattgtgtgattctctccttcacgggcagtcttatttactgtaaaactaaaacagggagacttccacaatgttagatcgaggaagaaaaccataattgataatggtaagaaagcttaacagtgccaaaactagtaatcctcaaaattgcatcttctaatatcacatctagagctctttgcattgagtaatatttctctttaaatcataacagtagtaattcattcaggataggactattttaaaaagcacttacaccattattggtttagctgatggtcacaaagtctaccagtgttaggtagacgtggatgtttttaaaaacgaattttagaagtcagacgttttttgtagttacattgaaatctgctgtattactactaagaatgattgtcttaaaagttgatttttagattatgtttctctctaataaaattcacttctataaaattttgcctgctgctataggaagacctataaaaacatacattttaactcagaaatatttttcctgcctaattatctccttgttggcatttgctatttagttacattgtgcttcctttttatatgtgatttacaaatagcagtaatgttgaaaaatgtaatgtttgttttaagtttataaacgacagattgaagtaatgagtttgtggatgtaccatgaaatacaaataggcagatttttcttcctacctaggtttagttttaaaaatatgaatatttgattcatcctcattttcatcttaacagatactgccacatgtttaaccaaaagtaacttatccctaaatttttcttacattttaatatctataagctgtcttatttttattggctttgattcagaattatttctcttttatgctttattccttatttgtatttttatcatagatcaaatgacagttttcaacaacacacagatttgtaatggctagaatctcatttactaatttattataaaaacagaataatctaggcattaaaaacctgtgtgcctgatacttaatctttgtgtttgtttccagaggcatgcagggtgtttcctgtccaagacacaaaccatatatttcatttgtcatatctaatgtttttcatatccagaaatcatgctccatgttatgttttacaagacttcataaaaataagtgatccaaataaaatttatagttaatttttctgtcatagcaaaattatctctttctcttctttttcccacaagggtacagatgggattataaagtttaaatgagtgtatatttacaaataaagtcttaagttttgaaactagacagtaatttattatttagacattgctagcgttgtgttggtagcattacaatagctttctaaatgaaaacaaaccaagcaaccagccaaccctgatttgcaagtgtttgctgatttctctggtgaaaatatcccatgatggctgatttcagcctgtcaacatgagtcactgaacatggagttgggaagagatgcttagtcacacattattatatggtatttccaccataccagacgtaagtagaagcaagtaatcttcagagcacagataatagtaaaatgtagtcaaataattataagaacatagataatagtaaaatgtcaaataattagaagtgatgaattttgagtacctattatcattgtttttaatttttttcattgcatgtttctaaaatttaatttttaatgtcgtctgtttgaaccaccaactcccaaaatttccgaatgtttagcaatcagctctcataggctggcatgagccagccctagcacactactgcacaaaaccatttctggtgaataggaagataggttgtggtcagtgtctattgtaggagaggatgtcttgtgtctgcgtgcccagggaggaaaagcagccattttctgtttcagctcacattactaaacaccacctggtcccataaattttggtatttatattaatataaggccttgaatgagagcaaaataccagagtcttttaataaaaggacagggaaaataaatattttcattacaaagattacaaaaataaagattttcattgcaaaattattcttatttttttttttctgtatgtctcttggctgttgtatatctcccacttgaataataagcagatcctatagtcagtgcttcctaatgccactccagtatcaaggataagctacttaaatagttttactcaacaggatatattgataatttatgtgttaacagaaagtagtagctgtgttgttaccaaaaaaaaaagaacttaaatctttaaaaatttaatatgcgttagcaactgagataacgaaatgaacagtgtggagttaaagaatctcatgcaacaaatggcagaattttaagtgcattttgtcaaacttccccatttaagaagagggtgagctccttcctatattactattggcagcttatcggtggtgttagtcaagcattttgaataaaataatatgttaaaaaatataattgatttctttgggggaatacaggagatctctagataaattcatttagatgggttgacaaaactaatggtgtgcatgattaagaagaaaaatttgacatattctgtgtataaccctttgagtattaattctgaccagatcacactgtaaataatgttaactgtcataaaataaacacagccggagtttgcaccatatgttttataattattttgcagcttctttttttttgtttgtttgtttttactgaaaatggaacctactgataactctgtgaagttatgtttacataaaagtaaattatacttgcacgttaacaaacttggcttcacagaccagtgtctctaggtttttgtttaaaaaaaaaattaaatgaaagaaaaacttctccctctctcgcttggttttttgtttttttttttcttattccctcagaaacatcgtctcaaacagaaatctgctgtagcatcttgtcgccgctttcttgtttttgcacatgtgaaggagaagcctttggaatgccacccagaggagggaaaagcctaaccactgaactcacagagagtgtttggtttaagtagccctggagtggcctttcagactgaggctactgtggtcttctagtttgtttttgttttctaccttcttccttgcaagtgtttaacactgccagaaataaaggctcccttagaacatttaagtaatttttaaaactgttattattttcataatcaccatctcctcttgatctcaggggaggctaggcatccttgtttatctttaatagagccttggaaactgatagtgccaatgggaggtgggtggcaagtttcgtaatatgcctacctcctcctgccccctcccggctcattgctaaatatgtctcttggcagatctgacaatatccataattatcaggcaccgtgagccctgctgcagagctgcttgtgcatgacacctgtccagctcatgctcttcccctgcatctcctcatgcctcggcttgctggctggccgtgcgtcagagcaacagtctgccgttagtgaactcatttctcttcttgtcagattctcagacaccagaagttctgcccacacagcttacaacatataccatggtttgtggtgcaatctttcacacagtaggcatttcataaacttttgtgaacaaatgcaaaaagttaatgcagatatttctctcagcattatggtttacattctccctctatgaagtgcttttcccgctcttgacagatttctcagcataatatcatgttttccataaaagtggatcttgatcatcgccctctctcctagacagagaaaagccttgtcagtttttttatgagagagaaaatccagggaaccccaattggctttcatagtgcttagcaattctcatgaagggggtgaaatgtggagtagagaaatgtacagtgatttctggaacttttgttccagaagatgttaataaggtgaagttgttgttaactaaattttgcaggtataataaaacttgaagatgaagctatattcagggagaaaatctgcaaagagaggaatttcgtaaagggcagggtgaacagtaatgccgcttcagtagttcatgcctgtgcatagtcaaccttagaaaggcttttttaaaaaaaaaaacaaaaaacaaaaaacacttcacttttttggccaggtgcggtggctcatgcactttgggaggccgaagtaggcagaccacttgaagtcagcagttcaagaccagactggccaacatgatgaaagtgaaaccccatctctactaaaaatacaaaaattagctgggcatggtggtccgtacctgtaatcccagctactcagaagctgaggcagaagaatcggttgagcctgggaggcagaggttgtggtgagccgcgatcatgccactgctctccagcctggacaacagagtgagactccatctcataaataaataaaaaataaaactaaaacctcagttttgaaggagaggtcatagatttcggtttggggatttatttagtggaacagttgtcaggtattcatagaaggttggattaaggatgaaacttttcatccttagaaactacagcagtctatttaatgaatagcatactcaaaaattatgacttaatatttttattatttataaaattttattccactagaacaactagtaatcatcatctattatgcagttttgactaaaccctttttccacaacagggaccagaattaggtaagaaaatttgggaagatgtcaaaatatatcaaagcttccttttaaatatgtgttattggtttttgattatgaaagtaatacaaaattaatataaaattgaaacattgcagtaatgtataatgcaaaaatgaaaactgtccatagcccctttttgtagagataacacttctccatatgttatcattatcatgtatctgtggcactaattatgattattagtaaatggattcattctatgtatatttttcttatatcctactgtttaaaaaatatatcttgtggttgaccaaaaaatatctacccacttccactcaaaatatccatgtcaaatccctggagcctgtgaatggtaccttatttggaaaaaagggtttttgcagatgtgattaagtcaaggattttaagataaggagataatctcggactctgtgggtaggccctaactaccatcctgtgtatccgtgtaagatattaggagattacatacagagcagaagacatatgcaaaggaggaggtgaggtaaagatggcggcagagcctccggaagctaggagagaggcatgcaacagattatttcccagagcctctgagtggaacacagccctactcacacctcaattgcaaacttctggcctctggaacagagagagaatatgtttccattgttataagccactacggtggtagtaatttggtgtggcagccctaggaaactaatacaggcctctttccacgttagtatagagagatctcatccattttttgaacctccatataatttcccattatgtggatataccataatttatttagtcacttatttaaagacagttgggttgttttcagtgtttgggcttttcaaacactgttgtaggaaatatccttatatgtgtttattactgtgtatgtttgtttttgtagaataaatatttagaagtagaattgccaggtcattatgtaggtacttctaaaactattgtattttgggtaaatatgacatctgccactttgataggaatatttatgctactctatcatgactctggaccataaacaaagtagataactatagaaaccatctcatatattaacatttagaaaatcaacagtggaagttgttcctctcaactcagtgttctgaaaagcctgaaagctcaatatatactgagttgaaaatctatgagaataaatatcctcaacaagtttttgtattttcgtttctctaggaactgaaaatttctgtgacatacctattgttttcccaccatgaaacaagagctgttaaagagatgacaagaaaaaataagagaaaaagttatattcaagaactattgtcattttagaaaataagtcatatattattaatggagtttgttagtaacaattatcttaagtaataattattcaaaattgtaaagaccaaacctctatcgtttctttgtcatgatttttcttctcattttgtcattctaaccccacagctcttcaatctttcctcacttccaagtccattttactgttgataatacaagatgcatttggcatctgttctgttgttaaagccctcaggaaaaattataaagctgttcttgcaaattcatcattattgttaagaaccgtaatttacctcatggttatctcatcctttttccacctcttacctgagctccaggatgacattgccttcctgggtgaggcagcgttgcagcatctcatctctcccaccttaatttgtagcgatgcgttgcatttgggtgacaggcagttgttcgtgcttgaataactcaggatttgaattctacagtttgtggcatccgtgtaatgcttagcagtaggtacagctgttaactattcgcttataaataatcttttttgcctctcaacctgtctcccaggtagtgtacctgtcaccattaataactctttagccgctccctagtgatttgacctatcagttgtcgttcacagaaaagtggtgctctggcctgctattgaagcttatgcaggttctttcagctcctcagtcaccccagcagccatatacttgtaggaagttgtgttggtgggcttcacaagcaggcagctgaacacttcgtacagtttgataaaggtggcattacattttgaacaatagatgataagactcccatttagaccgcaaaacagtgccacaggggtagacaggggtctgggggagataagatgggtggtgaagatgaccaacagcaaataaactttcctgtctctttgatgctaattatctctttgcacctaattatcatggcatcatcatcatcctctgatgtttgcaaactaagagttgatgtgtttgatcaggttagtgaatctgtcaggtatggcattctgcctgtttctgaagcttaagaatgagaagccagtagctatcatgcggaagatgtgaactgccccccagtccttgtcctttagcagtgtgtcattcctctgtttggacatgtgctctcttgcttcctctcttcctctctctgttcctgaagtgtgctgcttccaacacttccccaaattaattcctacctgcatttaggtctcaacctagccatcactttttcaggaaactgctactgctctctctatttggcattgactgtaccaactaaaatgcccatatggcagttttcgtttatttcttattatgctctacaataactgcttgtttacttgtctttttctcctactggattgtaagttttttcatggatggtacatagtgttgtttgctatatccacgttctgggagtgtcatagaatctcaataaatttatgtgaagagaatgagaatttattttttatgaactcactttccattgacatatcatggtcatatcaatggggagttcaggcaataaattatggcatatattgtctactgtatactgtgctggcaccaggggttcagataggaaaacatttcgattgctttttacccttttagtgagtgactaatggacatttctttgtctgaggatatatcttggcagtacaggatttcttcagacgtggctcaggaaatggccgagagtaaggtgaatcacaaggcaaaaaaaaaaaaaaaaaaaaaaaaaagcattaaactatgttgggaagtaatcccagcattggtggacacacattatgtttttaaaaataaatcctccaaggaggtaaatcagttaggtattatgttggtttggttttcatttggaaaggaatttacctcgtaaacgatctttgttatccttatctcactgggtgtaaggagttagcaaatgatcacatttttaatacccagaaaaataccatattctttgccacacagatgtacgcatatgccacatatacatacatatatgtgtatgtatgtgttcctttatatataattaaatacaacagtgatctgaaaagaccaaaaagagtaagaaacttagcattttagggagaacaaaaacaaaaacccaggatgaagcattttagtttacctttataaagatcaggacaggttatgtctgtaggaacttatatacagtatctagtagatagaatgataaaataagaaacaaaaagtatttagtcataagttcaaggatagactcttgattgtgctgtatcaaatacacttttaaagttaaaatgtattctaaaaaggaatacatgcctttagcaaaaaaaaattatataaaggactgtggttgaaagtaagtgatattggggtatagttctagaaatagtctgtgcatgtaaaacacaacatatctttctgtgtgtttgataaaaatggtgaaggggaatatagtgagcacattattctgcacttttcctttttcacttaataatatatcttgtaaacaacttcatatcagcacataaagagctacctcattcttttttaacagctgcattgtatggatgtatcgtaatttgtgtgcctattccttcatacactggtagactaggtgatgaaacatatttttgatctttggtattctggttgttgataggggataaatggtagtacattgcttttatttgcatttctcttaatgagtaaggtttaccatccttttatgattatcagtcatttctgtttccattttttttctaaacgtcttttcaggttctttctatatttctattgcgttgtaaatccgtttcatttttagcacctttttgtatctaaagagtattagcccatagtatatctgtattgtgaatagttgttcatagttggttttcagctctttaccttgtttttgcttttgcttttcatttgtttttgttgcgtagttggttttctttttttaagttttgtgtggttttattaccttttgattgacttttgattcttgagtctggcttagaaagatcttcaagtccttaaaacaatgtgaactagttaatgttatctagttatcaatgttatctactagtattttatgtagtaattgtattcagtgaatttcaatctccttccccccccctcccccactccgggtctctgtctgtcacccagctggagtgcagtggcgctatcacagctcactgcagctttgacctttcaggctcaagtgatcctcccaccttagccttctgagtggctaggactgcaggtggtgccaccacacccagctaatttttgtattttttgtagagacagggtcaaactatgttgcccaggctggtcttgaactcctggcctcaaatgatcttcctgccttggcctcccaaagtgctgggattgctggcatgagccactgcatctggcctgaatttcagtcttactgaataaaatttttcagccaggattgttattttcttaaggtaataaatgttgttgtatagagcttattattaataagatttttcattcatctattttttcttccactgtattgttattttaatgacatttatttacacagagtatgttaaacatgttcagtagattattatacataggaacatcagagtcctatttagcaaatagactaatttaagctcctaatatttttaggtataatcctgaatgtgtatttagaataagaaatcaccccccaaaaaaaaacaggaaatggaaacaggaatcaaggagatttgggccctttccttctaaatttccttagggaacttgtcagaagtgcttacctagaaatcttgcctgtttgcactctggcgtctccttaccacctaggatgttctcttactctgaaactcctaacgacctaggcaaatgagagacctgagctgaagccccattcactctcaggttaaatctggtgtctactagtagctcatactgtacttcattacagtttcatcagtcattaacactggtagcagtttcaaaggggtcacagtcaactctgttgctactggtttccttgtcattttatttaacttttttgtctttattataattcgcttcttttaccatgcatggtgttctcaccccaagtgctcattaggtagtaaagaggaaaaggtggagattgaagaagcagcttatttcacagcataatctcatatggtggtgttttgtttttttgggtgaagctaaaatctgttagagttgtaaaatagaacagttattaaaatattcttttttgagatggaattgttgtccaggctggagtgcagtagcacaatctcagctcactgcaatctctgcctcctggacgatctcagttcactgcaatctctgcctcctgggttcaagcgattctcctgcctcagcctcccaagtagctgggattacaggcgtctgccaccatgcctggctaattttttgtatttttagtagagacagggtttcaccatgttggccaggctggtctcgaactattgacctcaggtgatccgcccgcctcggcctctggtgttgggattataggtgtgagccaccgcgctgggccaaaagattcttttaatctttttttgtattctttttccagaaagtttatacctttcttctctttagtcatactttgaagagggtttaacaagattcaccttcacagttgtttttcaaggcagcgttaggacctgacattaattgtttttttttgttttgttttttttttttgttttgagacggggtcttgctatttcgtccaggctggagtgcagtggcgctatctcggctcactgcaagctccgcctcccgggttcatgccattctcctgccttagcctcccaagtagctgggaccacaggcgcctgccaccctgcccggctaattttttgtgtttttagtagagacagggtttcatcgtgttagccaggatggtctccatctcctgacttcatgatccacccacctcggcctcccaaagtgctgggattacaggtgtgagccaccgcgtccggccagttgttttattttaaaaaccctttccgtgttatgtttgtgaacagagccattttcattgataccgctttgaaaacacacgaatagacactgaaactcgatacctgtgttttctctcaccagttctgcttccatgtttcattttcactgttctcagtcttctgattgagtgaataattaaatgatgacctgagagattggtgggagtgaactcttggagcatccagctttctttatgaggcttagactggcttttctttcccatcatggttttaggcttgatagatgactttatacttttctggacagctgggggttaaaacagagtggtggttttgatttttggcatttttcagctgctcctcaggagaatataaagtgcctgtggagcaggtccaaatcggtggatgtttaagagaagggggaaaaaatagctgaagaacattcttctgtgacttagttgccttctgttgcattaaatggatggaaagggggaataagtgttgtgctttatcgtttttaacattaaaactcttttaaaaagcttcaaaccttaaaaaacacgaaatgaccttcaggcctcttggctcccactgttcaggttatcaagtctcagtcacaccctcccccatccctgtaaaaaatctaaagagaagtgtgaaaagcatcagaaagtctccttttgccagttcagccttttagtcgcttgccagcaccttcatctcttcatatgtctctagctaaggtcttacatggaacaaaaacccgacagcaatggagaccagatgccggtatttcttctctgtcacttggctgctgagcagatggaatttatatcaatcgggcatgctaggaggaagaggccgtggcagccaacatgtggaactggggctgagtgacatttctgctaatgttttgtccttgtagaacattatgcttcctctttgcttatgagctgtggttttcctgactcagactaggttccagctccagctggaatggctgttgctcttcccctctcctcctgccccccttttcagggagtgctgggagctaaggaggagtagtggggcctgcacaatggagctctttattaaaatacctgacatctgcatgcaatgcaccaaaatcatctcagctcaagcagaggaatgtgctgggcattactagtcactttttgtctagtgctgtgtgcttgtttgatttatataatgagtgagtgcctctggcaaaagaggatgttgagcatattattggaggaagggagctttttaattttttccaagaacattgtcacagacaggcctaatactcatacaaaaatatgagtatttaaaaacggttgcagctatcccatggatttcttgctgtggcttaaaaaatgttacacccccctctgctccatttaaggtaaaattagaactcagtaatccaatttaacatgatatggagttttaatgttggtgactactgttagtaggaagtagcacttttaaggaatctcacgttacaaagaatctctggaaggaaaacgtaaaatacatgtcaaaaaaccataaaggcacacacatagaaagaattattggtgagtctttaattcccgtcccctccctcagaagagtacattactcttttcatactgcaggaaataggtatatgtgcgcaaattatattttcttctctaatgatgtaaaccattcacgttttacctatttatggccagtatatgacgaatactgccatgctaacacgttatatcataaagcactgaagtgtcatgacattgctgctcacattgccaaatcagcaacattgtccccattcccacttagaccttttatttccggtggaaatttaacttaagatttcagttgggttgtgggtacattcggagcaccagacaggggaggtagagggagatagagcttccactatttttgttcctttcttttgaaaagcagcctctggcagacctttcctggtctcttccaaatatgtcggccacatctgtcatatcttgagttttctagaaaactcccagggcaggctagccattctttatctttaagaagcctaaattctgtctctttatcacttttttaagtgattctcctgtctgatgtatgttcctcttatatcttgctccatggtgtggggatggccccacagttcccttgggattgaagtaaacccatgtaaattgatgagaagctggagtaaaatactaatattagtatgtctggagaaagacccaagtcagtcattcttggaggaaattcttcaaaattgccttggatttctgtttttctttgcaatttttttaaagctatgcttgtgccatactgaagacaggatttcttatttataaagtcattcaagtggcctgatataagaaacttatagtaacacaacatatatgcccatagcttatgcaggtacagtggaacctggaatcacaaagtacagttactccttactgtgtgaacttgagctctctgtactcaggaatgatatggattcagataaattacttagattgggctgctgggatgaaaggagtctcccttggtctacactctcttatgtgctgttcagagaatgtcctatctcttgctctccaactcttgctatctatgctatcattgtctaaacacaggaagaagacagatttaggtagtgaaaaatgtctgtgcatgcaactacctgcaatattgcagaggaataggaatctcatgctctccattcagattgttcttacaccagttcctttccttctcgattttgtacttaaccattcctgcttttctttttgaatctttggcttctttcttgttcaaggttttctctcttgcttctctccctttccctcaaaatcactcacataatgaagcactgaccttcgatgtttccttttctgtgacccttatgacaagaatgcttcaagctggaagagcccaagtgtcgggttggtgttcagcagtgtgagatgattgttttactcttgcctgagagtcccatcaagaagcacgggaaaggtttcctcgtaggcctcctggaactactgtgcgtgtgcatttagctggaagagaagggagcagacatcatcctgcagaagtcagattatggtagccaaaatgtgtcggtatctgcccattagagtttctcaagaaggattcttaaagataatttgatttggtccttggattctgggccttgccatgtttggtcccaggaactatggcactggtccctgccagtgtctgttgactgtctcgtgggtatggtcatctgtcctccactggaacataactcctttagttctacctggaaggaggccaaacacagtctttggtgttgtttcaaagtctgattctttctcttgccagttgtatgacttgagcaaattacttaacctccatgaacctcacttttctcttctgtgaaatagaaatgataatgtctaccttacagggttgtagaaaaaactggagaaaatggtagttaagtgcttagtacctaatgagaactccacaagtagcagctatttttgttgtcattgtctgctaacagcatggcagccttggacagcctttccgtctaacctcatgtttcacttgatcagcagcagccccaggtctaactagtgtgctgcctttgaagtccacccactgccactagggctcattcgccactacaaaatgagaaactctcccagaagtgagggttgtctctacctgtccaaaggaacacatctctacatccgaagaggttatctcctaaatctgctaaggttgatttgagataaaagctccaattcctatcttttgggactttacgttagaattttcagaatccttgtctctggcccttgatccattcaactagggctactcctctttccagctctagacaaaatttcttctgtaagaatcaccccctcatacctatccctcccctctattgctaatggaatgcactgggatttatcatgcaaatgaaggtcacacctcccagagacacagtccctagacactactgggttatattttaatgacagctgagaaggtagggccagtaaaggaggcattcatccctgtttaaaagaaaacgaagcacagtgcttacctctgtctctttctaaaaattaatctgacaattctggcaagcacaccttctcttctcagcatagagacatgctgataacacacttgctttttgtttgtttgtttgactcaccaaactatatgataaagacatttgttttctggttttattaaaatatgactttagggccgggctcagtggctcacgcctgtaatccctgcacttggggaggccgaggcaggtggattgcctgaggtcaggagatcgggaccagcctgaccaacatgatgaaaccctgtccctaccaaaaatacaaacattagccaggcatggtggtgggcacctgtagtcccagctactcaggaggctgaggcaggagaatcacgtgaacccgggagacagaggttgcagtgagccaagacggtgctactgcactccagcaagactctgtctcaaaaacaaaacaaaaaacaaaaaacaaacaaacaacaacaacaacaacaaaaaatatatatatatatgacttttgcacctgtacatcccaaatctcatgtaacagagactttagtagaatatgattaataatagtaaggtgggggcatttgccctttatacctaaaaggcatgttttctatttttattttattattattatttttaaagatatggtttcgccctattacactggctggagtgcagtggagtactcagtacagccttgacctcctgggtttttgcaatcctcccacctcagcctactgagtagctgggaccacaggtgcacaccgccatgcccagctaattttgtattttttatgtttaatagagacagggtctccctatgttgcccaggctggtcttgaactcctgggctaagtgatcctcccgccttggcctcccaaagtactaggattacatgcatgagcaaccacgttcagccatatttttaaatttaattttcattattatatttttataaataattcaagctacaccgaagtatatataatagaaaatgaatacacacatctattgtcccttctttccagatttcactctcaagatgcaactggtaggcccaataaccagtctgtgttccttcgagaccagtaagttttaagggatttggtagaaaccctggcatgagatatttgtgccaagtaccatttcggattggtttacacatctgaagtatggctgagaattctgcaattatctagtatattaatcatcttagaaaactcaggaccctatgacttgtccaccctgctttagaaataaaaatgtatatggttacatggaacctacaatttactgtgtttatataaacaccccaggcatatttcctttcaaaaatgaaatgaatgatatgatttttttgtctcctttaagctttggaggaaggaagtaaactaatgaactttatgctcttgtaaatgtaatgctttgcatcataggacaccaggtcaggtttgtacatttacttaagtttgtgtgcacttgtgtacgtgtgtgtgtgtttgcaattaatttgtcaggtaaattacagcatataggaattaccctcccactgccccttctttctggcaagcaatactgtttaaaacacatactcatgatcagaattgggctaaaacattttgtagagctttatttatttaatgagataccactaaagccttaatactgtaaggcaaatattgcagtgaatgccagtatttcagtatatagtagcatatccttgcctttcagtctgttaagattgactaacatttaattaccttgcctatgttaaaaaaggaaagaaattaccttatagggatatgcaagctcctgaggtttctcagctgtgagcccagccaagttgccctcctccaactggctacttccctcctcaacacacagaaccttatacacaacagtaaataaccctcaataaatttgaatcttatctcaatctaaagacaccaccatcattatgggggaatgttgttagtcctcaaaacctcagtcagtttagaacaacacagcagtatccaaactttttggcttcgtctggatattgttactgcaagtgttggtgctgcattcctggatgccgtttacagagtgatttcttaaacattggttgtgtcacagtgcaactgaccagtttaaagccttttgctattttgctcacaatcaaagaaaccagaaacatctaattaacgtttacctcatttagagttagaatcacctgattattttactacatttggaataagcataagagatgcttttaatacgacaaattttaaaactatctggattaaaacacctttttattcacttttttattaagataaaactataaattaataattagtctcctattagtcttaagagatttttcaaatgactttggattttaagatgaaaaaagaaaaaaaaagaagcacacatttaactgagtttgttttgtgtgcttgtttgtatatttagactgtgtgtactagaaagaacccgctttgggatagaaataaagactctttgagttctcaccctgtattgggggggtttctgggtacctatgtatgtaatttggacattgatgatacataagtgatatttatctcagttggtatagaaggtctcatgagttatcttgacagctgcataactgttatccactgtaaactcgcttctttaggttagtgtggttagtttttttttttttaagtttccgcataatcattggggaatcttagcatttaacttgcaaacgcttctcagagttctgatacctgaggcggcatcacaagaacgttatctacaccagccccatcttggtaggactgaaaaaaaacaaacaaaccaagaacaacacaaagaaaatgcatgttaatgtggctgaatattcattagaaccctgcggcctggggctggaagcacagttaggctgtgtgtttaccaggccacccgaaaggcaagagggcataaggcacttagaaacagtggctcagctcaagcagtgttgtctttgaaaagttttcattttcccttgaatcagctacagtctcttacttaaggtcactgcagtttgcaatctttggcagaagacttcttccttttatggtagtggcagtctgacttttttttttttcccttttggaagtgttttcctctcaaactgccattatcttccaaacctgtttcatgttacaattgtcagatgcctcttttctgaatttcttagaacataatgcaatgagatgtatatatatatatatcttttttttagcatggaattgaaagtcatatggttatgatttgagaatgtcaagcttgattttttttttcagaggttttttttaaattttttttttttttcaaattgtacctttttctctgggcagtgaactcactgcagagacatcaaagagaatgtgtactggatcaaggtgattttttttcgaccacatcattgccagctgtggtgtttatgattagagacagacgttccagacacctccgagtcctcactaagcgtcagatctttaacgggatccatcccaactgagtgacactaaacagacagccagaggggagttggtgggatagaacagggaagagggcgggtgagggtgagggaggctttggtgccgggtgcattcaccagccaagctccgctaatgccaggctgcaggctgcccagaggccccgtagcattcctttcagcacagctttcattagccaaggggatgactggagcccagcaaacacagtcattgatcctcttctcaccgggcgcagggatgcagtgttcaggtcacagcccagtcggctttgaagcggctccatttcagacactgacagccacagactattggcttcttggagctgacatgattccctctcggatctccatgctctgctccatgcagctaatgatgttgaattccctctggatgttgcttccacttgcaatattaacacttgttcagtggtcctattgatgcaagaattatgtaaatagccaacagtactgatagctgtgcattaaagggagttctctttcctcccgtctgttcccttctgggtcagtgtaactgccagacagttttgctggttccagaaaccagaatatatatctggaatcagtaatcaatgtggtggtttggagttcaataattggaatttttaaaatcaagatgatctgcttatccagtgattgccattagcaatgaagaaagaaatggttttgttgacaactacttatttctctctccatgtgaaagtgtttttttgtttgtttgtttgtttttcaattctgtcatcatcgagacgtggatcccttgctaacaacagttcctggtgactatagaaattaagactccttagaagaaaaatgttattattacaattcaaaaaagaaacaaatgtgctcacctgttggtgggaggacaactgaaatttgcatgtcaactgtaaacatctgaaagataaataagagaggaaagaaagtttatgatacagataacagattgctagtacagagctgctttttcagaacctctcctttattaccagtatttttcccccctttttaaaaaaaaatctaaacaattagatgtcagcattgggtgaaaaacacataacaaaagattctggcttttgctcatcattctgatctccctgctctgcatactgaagccccacttccttttgttgtcctcccagtggaatttcagccactcagaccagtcaggggtgtgttggcagctatcctctttgaatggtagagagtacatttattctttgcacagaaggaacatgaaaatttggtttgaaacctagtaactctcaggctgcatggtctggagacaatagaagtatttcatcccttgaaaccagacgaatcttgagtaatcaggtgaacctgccttgctggctggtggtgcttcactgaagggttggaccagggtgtagaaaggactttggtggttcagatttccactggaaaactgtgacatcctgccatctcagagaagaaagttgcaggagatagccacacgtataggtgattcctgcttatctggctaataatattcttgctaatatttttgaaaagaaattagttttgggccttcacggaagctaacatttaatctcatagggcataaacacgagcgtagggtggaataacagcctaatgttttgaaccccatgaatttgctaatccataggaagttccattaagaaactccctagttcatcattcatagtatttcacctgtagctctaatccccaggcccatgactgcccttctctcttctgagttgtgtgtcagtcttcaacctacggtccttcccgactatggactcatgtacaactctgaatgaaactagcatctttcaaagaagagtctagttttcttcctggtcctgtacccctctgtgtttcgttgtactagagaaatttcttatttattaagaaccttttcggcctggcgcggtggctcatgcctgtgatcccagcacttgggaggccgaggcgggaggatcacgaggtcaggaaatcgagaccatcctggctaatatggtgaaacccgtctccactaaaaatacaaaaaattagcggggcatggtggcaggcacctgtagccccagctactcgggaggctgaggcaggagaatggtgtgaacccaggaggcagagcttgcagtgagccgagatcgtgccactgcactccagcctgggcaacagagcgagactctgtctcaaaaaaaaaaaaaaaaaaaaaaaaagaaccttttctcatgtcttagacccgtgtcttcataaaagctatttactttaataaagttttcacattttgaggggaaaatagtaataaataacattctatacctttcatttgcatgaacactttatttcattattatgtttttcttttcttttcttttttatttcatttgagacagagtctcattctgtcacccaggctggagtgcactggtgtgatctcagctccctgcaacctctgcaggttcaagcgattctcatgtctcagcctcccaagtagctgggattacaaacatgcgccaaaatacccagctaatttttctatttttagtggagacgggtttcaccatgttggccaggctggtctcgaaatcctggcctcaagtgatcttcccccctcagcctcccaaagtgtttggatttcaggcatgagccaccacgcccagccatatctcattattttttaaaagtttattttgtatgaagaaagttatgctttatgccagtgctacccttctccagtaaaacaactaattgatggttgagatgattgttttatttgatgaaaaatgatacttttatatcaaaaagattcttactagttttttatagaaaccccttaaaacatcaaagttttatagtgtacataaaagatgtgtttgtccacatactaacctcgcaaataaatgtataaagtaaaacaacaaagtagttttattagatgtgcctttgtcatcatgcaacaagttagttcagttggttgtttatttaattacattgtgctcaggttctatttgtgtgtgtgtgtgtgtgtgtgcgcgtgtgttacctttattggtctttaggactgctgtgtgtcagcattatcccattttacaggttatgccacggaggcagaaacaagctctcatcagtttgattgtgagttattggcttgaggattattatgactcatgatattttagtgtcctcagtaacaataactttttaaattgctcagaattttatttaccacatgttgaaatagcatgatttttaaaagtactcagtccttctatttgacagaatagaataatttcatcagtaatttgatgatcaaacacccttttaaggatttcatttcctcatcacttcaaggaaagaaaaaatattaatattgaggagggtaatgcgtgtgaagctttcttcaaattatgtttgtgtgtattcacatgtgtatacaatagattaataggtaaaatagatcaatagattaatcgcttgattcaaacaaataaaagtaggtttcacataaatttttgattctgttgtatatatttgcattagtattataagtatcataatgagatttttacggagagcacttttgatggaattttaaatgaatgttttaatgtattattggctggcacagacacacaagtacacaaatcctttagtgtgatggccttgtgcttgttttggtgaaatagtattacttctatgatacatgaaaaaatacctttgcttactttatcggcaaaaggtctttattcttctgcccctggagttaggttaagagtatatttattagccaggtgcagtgtgtctcacgcctgtaatctcagcactttggggggctgaggcccatggattccttgagctcagaagttcaagacctgcctgggcaacacagcgaaaccccgtctctacaaaaaaatacaaaaattagccaggcatggtggcttacacctatagtcccagctacttgggagaatgaggtaggaggatcacttgagcctgggaggttgagactgcagtgagctatgtttgagccactgcagtccagcctgggtgacaaagcaagaccctgcctcaaaaaaaaaaaaaaaaaaaaaaaaagtaaatttattgccaggcatggtggctcatggctgtgatcccagtgctttgggaaaacgaggtgggacaatcccttgagtccagaagttcaagaccagcctgggtaacatagcaagaccctttctttacaaaaaaatttaaaaaccagccagacatggtgtcaggtgcctgtagtctcacctactcaggaggctgaggtggaaggatcctgtgagcccaggagtttgaggctgtagtgaggtatgatcgcaccactgcactccagcctgggtgacagaacaagacctgtttcttaaaaaaaaaaaaaaaaaaaaagtaagtttagtgatctccattagcttttctgagaaagatttcatattaaacaaaagctaagtggctattccaagttttgcctatccttctctctgccttttgtggaacaaatgtgtgtttcctgacagccttcaggtatatgtgtaggtctgaaaaagtatttcaatgagaattgcatattgaggtcatctggaaggaaatgtaatattttgcccatgtaaaatctcgcaatcattactcagattaaagacaaagtgaagccagctagctcagttaaattttcagttccctcactttagcaccaaataccaccctggcagtgaatcacctgagaatttcatccatcactcagtgataaaatttgataacatttgtaggtcaatttattcccctggaatttcctctacaccttccctatcctgtcatgtgccatagtttgaggaagaggaaatgattcaaaaatctgtaaaggcttatctgttgatttctgacctaggaaaaagaaattaaccaagttttaggtcttgtatttgaagagctggtgcaaatatatacagcatgtagctatgtcgggacttggtgaatttccctgactttgtagattatacaccaaatgtaagggtaagcgaaagaagaaagagtacgtgaaaggaggtcagatacctctgtgtttcctgcctttttatatcctaattttattacagaggggcgttaagtggatctccttgctttcttttcatgacgaagtaggagactttccttttggtagctattgtgcacctctaggaaaatcagcaactcagcagaaaggaaaccaggatgcaggcctagcaggaggctgtccacccagtgaggaagttggacattttctcttttgtagagatgactgatgatctgtggaaaaagaacagtgggcactgaggccagcttctctaagacagcttgagtgaatgtgtggctagcgcttccttgattaacagaggtctccctgaccgtggcaatgtgttatgactcatagccttgcagagatgaattgttcctgaacggtttctccaacatctgagatacaaacaggtcttttagccatttgctagacaccagaagaaaaaatggtctaaccagtgtaagacctggaaacagcctagaatcttcaaaaatacttgcactcaaagtcaccttaattttagaacccaaaatctggacagagaaccatgtcagctaaccattacagttgaaagttcatccaggtgacctctgtttcttagaaatgtacaaacaacctctacatatttcttctttagtagttaaatgactttataacttggagctttggagattctttttaaaatagcaagtaatactgctttctttggccagataacaattttcctgctttcctgaatagaaatttgacaggttttggaaccttatactttggtatggaactgaatagatctttgaagccttcagaattacttttacccaggttagtaactttgacttactctcagtttaaactgttccttttgctatcctggttttctgtaactgggatggatatgcacagaggagtcggttgtttcttaatactgttttagaaaaccttgtgacgtggtatggattcccagtatgtctgataccaatgttactagtgaaattggctgagtaacttatgtgtgcaaggtccttactcccaacagttagagacatttatgtgtttcctgtcctcgaggactgtagacaacagctgccttgcatgaaatgattgtagtacatttaccaacatttatatgccaataagtagaaatgtatatgttagaatttgaggatttaagtgttgaggtgatctgtaagagaagataccagagccaggtggctttctttgacagcttcctggagaaggtgagacttgtgcctagatatcaaagttgctgaagatgaagtggacatttggggtgagtttaagatgtgcaaaacattggctgaacatggtggcttacggttgtaatctcaatgctttgggaggctgagggaaggagtttgaggccaggagttcaagaccagcctgggcaacatagtaagactctgtctttactaaaaataataataattaaaaaaacagccaggtgtgatagcatgtacttgtagtcccagctacttgggaggctgaggcaggaggattgcttgggctcagaagttcgaggttacaatgagctaattgtgccactgcaccccagcctcggtgacagagcaagacaatgtcctaaaaagaaaaaaaaaaaaagatgtgcaaaacatacacagaggagggaaagagtagagaagtagactgatttgtgggcagaaggcagaatatcctggatagaagaaaagcagatagttgaaaaattaactttgtgggggctagcatagtgtatgaaaatttggatttgggcctctgggcataaagagccaagaaccaataagaattttgacctgcgtggaacaataggatgaaaatttcatgaccaaagaattctggccataataaattcaggtgtgaagaaattagaagaattttcttcagatattcaagccaacatgtacatgccagaaatacaacagaatggatagtggcttgaacgtcttgtagggagagaatcaacaagaattatgatgtttttttactgagcattaatagtgagagatcgaaggactgtgtctcttttgttgctttgtattattaattgcaagatgttggtgatacagtctacccaagtatgtggcaagaattctacataccaaaacctgtttaagagttgactgatgtgttggaaatgtccgcgatgatcaagtccaagatgtctttgaccagaagtcctgaggacctatggagcagaataagtaagtctccttttagggtttatagcagaatcttaaaatttgttagtgtgttgaattatggacaaagaagcaatgcggacctttgttgcagtacttaaactttatatgctgttgttacctgttttatctctctcactagacttcaaattccttgtggcagagaaagtatttcttgcttatcttcttatactctgtgcctagtaaaatgcttgataggtcatcaatactcaatgactaaaattttctgtaatttgcattctcattggtagtgaagtattataataatgaacgattgttatgtactgttccatttaactctattttggaatgttctcaatagtttggccgctttaagcaagtgggagaatattctcaattatatttgggtttgtactagtgctatgtgtaattaaggttcatttatttattactaagtgtttattatggacctactatatgagcaagttgttgaatggaagcgtagaagaaggaaataggccaggcgcggtggctcgcacctgtaatcccagcactttgggaagccaaggcaggcggatcacaaggtcaggagttcaagaccaacctggccaacataatgaaaccctgtctctactaaaaatacaaaaattagccaggcatggtggtgcgtgcctgtagtcccagctactcaggaggctgaggcaggagaatcgcttgaacccgggaggtggaggttgcagtaagctgaaattgtgtcactgcactccagcttgggcaacagagtgagacttcgtctcaaaaaaccaaaggaaaaaaatgagctaggtgtgggggcatgcgcctgtagcctcagctacttgggaggctgaggcaggagaatcgtttgaacccaggaggcgtaggctgagccaagatcaagccactgcactccacactccggtatgggcgacagaacgagactccgtctcaaaaaaaaaaaaaaaaaaaaaaaaagcaaatggacacactgccctcaaaaggcttgtagacaagggagaaagatgagatttctctattaataactgcactgtttggtagaaaatactatgtacaatatgagatgtctagatataaagtgctgtagaagtttttgaaagtaggaaaggttccttttattccagaaggtcaggcgggccttatagagaagtgtaggctgggcttggtggctcatgcctgtaatcccagccctttgggaggctgaggtgggcagatcactgaggtcaggagttcaagaccagcctggtcaatgtggtgtgaaaccttgtctcttactaaaaatacaaaaattagccgagtgtggtggcatgtgcctgtaatcctagctactcgggaggctgaggcaggagcatcacttgaacccaggaggcagaggaggcagtgagcccagattgcaccactgcactccagcctgggtgacaagagcaaaactccaaacaaacaaacaaacaaaaaaaaccaaacaaacagcctggccaacatggtgaaaccccgtctcaactaaaaatacaaaaattagctgggtgtggtggcgggtgactgtaatcccagctactcgggaggctgaggcaggagaatcgtttgaagcaaggaggtggaggttgcagtgagctgagattgcaccattgcattccaagcctgggcgacaaggtgagattccgtcaaaaaaaaaaaaaaaaaaaaaaaaaaaaaaagaggagagagagagagagaagtgtactttatctgatccagtaagggtagataaaatttcaacttgccagatgacacagggtcagaaaatcatgagacctatttaggaaacagcagataatttcacttaagcgtgggattaagaagagtcacaggaaagaagctagttatatccaggactttccttgacaaataatggttgtcttcctgaaggtcttttgaggtctcatccagagccgagtgggtggccttcgtctactctcacataagtatttttgtgacttttctaaaaacttgttatgcctgtaaaaagtttgtggaactcagtattttttttaacctacacttgaccattaaaaaggtaaaaacttttctacaatttccatccaagttttaatgggaaaagtttgcgatagatttttaaaagctttcatggcccagtgtctgtgccagtttcgtcaactggcttttcagagtccacttcttactaagtctttggactaaaagtgaaaagagcttccagaaagctacaattatgctttttatttgaggaagtgtttctggttgctgtactccagaatttttgaaagagattgtaaatgtggttaatgcgactttgtgtacctgtgactgtcctacaaatgtgctaaaatgagactctggccttacagcttcagaaactgacttgttctgcttggggtgttaatattattacgaatgctaacatgaaattcaaatcacctgattgaagttcttagcactgtgattaatggatgaatttaggagagggaactatatatgatttttttttgtctttaactgttactgataaggactcagaatctttctgattctcttttaaaaagttttctctgtaaacttaaagcactattttcttttagaacagctttagtgtttcaagcttaaaatcttctctctttaaatcctggctgcatatttggctctctccctccaggcagagttttctccagaccttggttggctctgaatcccaagagttaagacagcctagcttctataaatcaggagacagcttcattatcaaagttatgtgttttcaccttcatagatagccagtcttagtgttggtgcctggccctgccttatcgtgtaaccatcagcactgcatactggaatgttctttgtttcgattatttactccttctataaacaaagattagagcaaaaaatgtcagtactgggccccaagcagtggtgactgttactggaaaattgcagtggcatggtgtgggatgtgatttgctactcaggcaggatagcactgacttgacagttataattatttctgagttctgtgctgcatctcttttatacattttatctcatttatacattttatctcatttatcttcccagaagataggttctgttctttccattttacagatgagggaaacaaggctcagaaaagttagcagtattgcctcaacttacgttgtgagtggcagatagttgtgtttcaaacctggacagttgacttcatagtcttctcttttacctactacatgataaagaaattccaaagatgacactgtttaaaataatgttacctagaatttgagcttcttgtaaccattacatggtcccacagttttgtggggttttttgttttttaagagatgaggtcttgctgtgttgcccatgctggagtggagtggctgttcacaggtgcggtcatggcacactgcaacctcgaacagctggcctcaagtgatcctgccgcctcagcttcctcagtagctgggactataggcatgtcctactgtgcctggctggttccacagttctaatttgttagcgcaggatgagaacacatttttagtattgaaatttttatttatttatttctagttttttacagaagatctagagataatggaatttatcaaatcttgactgatctccagtatttggagggtctgtatctttcttgcagctttcagggtctactttatttaagagtttacattttaatctgaattcagggaaaaagcaaagttattaaccagtctattttgggagtcagtatgtcacagaggttcatgaagcatcttgtatcatttggaatagatataattgtgagagaggaagacaattatttcagaatatgtggacttggattctggaatacatgtattaatacatgtattcattctggaatacatgtattaatacatgtattcattctggaatacatgtattattccaaactttaagaagtttgattctcagtaaatggtatgactaactactttttttggaacatgattacttatctttataagcattttcacatacagtgtaggaaaataatccttatttcgcagatgaggaaactatgacttagataaatgggtgctgttgctaagatgacatctagtaggtgcaggtgatgtgtttttgcttaaatttgccatatggattccgacttgcctgtaggtgctgggtatgtttataagatcagagtatattcatttcttgactagaataagtatgttttctgattcactacaaggttatttttcttactgaactataattcctggataaaacctcttgaacttaataactatcaccataaatatgtttaatgggtttattggcatgttgaaaagtgtattgtgttggcacatgaagaggcccacataattgctaaataatggtccttaaggtatttataaaggtgttattgatttgtagtttgtatatccatatatatttataacattctggtgacaaagaaaaacttgagtaaacattgtcatgtctgtggatatcagtgatagtaaaaagttgagatatgccttatttaggtccactcttccagattatcattaatcagatttttttgagagactgcttgaccccattttcctatttcttgaatttgtcctatcaccatatgattagagacctagttctcaacgagtgactgtatttcctgatgttgactgaaacatgaatgtcctctcccctttcctcactgcctttgggcccatgtattttgtatttttgatttagaaaaaaaaattcttagggaaacaaaaatgagtaaaaaaaaagttagatggattgtgagggcatgaattagagtaggcacaggattgttaatttgtctccttctgcacatccgtggtatagtgtttggagcttggcccaggaagaatgatattctgctttgttttttgaccctcaaaatatcctcgttcttggctatacccagagttccttagaaatgatgtttgttgtaacgttttgggacaaaattgtgggagggggctggaggagggtggtaaaccatatatattacactttaaaaatgtttttcctcttatattcttttctgtttttctttcaaatactctctgtagcaaactgtgcgcaatttctcttcttcatgtgaaaatttatctcagggcaagagacaattcatttaactgtcatgaattcatttaacttccatgtgcttttggaaagtcttggtacgctttcattgattgagttacaatcccataaatctagggtagattagaatacgcttgttgtagctcttcctttaggtacttcatgaggccacatgaaaccaccttctgatatttatgcctttgttttgccctctgtgggattaaccccatctcttcatcaagtaaaagcctgtataccaattcacagactttcttttcagcagaataaatcttactgttgatacaatcttttgaaatggaacatctttatatttttatgtaaagtatgattttcctgcaattctggctatgactttgtatagctttcctacatgattctgtggcttcctcagacctgtggaagaccttgactctaaatctgagcagacagaaagctaagtgcagaatgatattcttcaagtaagccattcaccccaagaagaagtaagagggggggaaaaaagacaaaacaaaacagtgtggaaatgtgtctaaactagtgtccccaagggtatcccaaaaccatttattctatggaatgttagtaactgttgtgctttaaaagttacaaagatctgataagtttgggaaagcctgtgttaaaaaaaaaaattaacccaatcctatattcaaaactttttagaaacttctttttgttgttagagacagagtcttgctctgtcgcccaggctagaatgcagtggcgtgaccatagctcgctgtgaccttgaactgaattcaagtgatccttccaagtagctagcactacagatgtgtgccatcacgtctggctaatttttcttattttttgtacaggtgggatctcaccatgttgcccaggctagtctcaaactcctaccctcaagttatcctcccatctcgacttcccaaagatctaggattacaggcataaaccactagacccccactccttccatgccaaccaaaaaaaggatatgttacatttcctaaactcatttatctgaggagacctttttcttgggactagcagtcaaaaaagcccttacaaattagaaatgcattttaaatatgcaagaaaatggcaaagtgtcttggtattccccaggcttagtcacttattctctgttctttagcaattcaaccaatggagtagaggctgtagttttctgtgggtgtcttacctaccttaccagaggtcagggtaacatagaccttagcttcctgaccttcctttgagtgttggttacattcgcttttttaaaacccacttagccattcatccagcccctaatgggatcagcgtttccatcaaaccaattgtggacagagagtttttagggcccttatttatgcttcttagattttctatgtatctcaggataagtgaactgtagagaaatactctatgttatgcagactgtgggagactggagtttagttctaaaagcatgtattaggctctgcaagagctactcaaccctaatgaagtcatctgactctaaggttttatatatctttcatcttccatttggacacccagccatctatccatccatctcactgagtggttgtgatggtaaaatgtatgaaaagtgttgaaaagttgtaaactttgagaaggttatataaaaagcattggtatcattattatcatcagtcaagaggtgtgttgaggaatggttttcattgctgactcatgagataagttacttcccttgttcctcaagatttttggtgaaaatgttaagcattactcattcgtatgaataataaagactcccttcagaagaatgtttgaaaggctaattacatttctgttattgtacaatcataatagcattagagagcacatatataattttaagtgcgttacttatatttgctcattttgttaccacaccaactctgtagtaagtatgattactaactttattttacaaagaggaaaactaagacgcagatcacttaggtaacttgttcaatatcatatagttataagtggcagagctgggatttgaactcacacagtctagctctggagtccatgctgttaaccactgtcttagtatgatttataccaggatactagaagacacaccactgtcttatacagattggttcaaatactgatggttagttactagttgtgagacattagacaacccaataaccacctgtctcattcctgcaaaaggactttatttaggtataaagcaccaacagatagtagtagtgtactcttaaaacagagtgatgggtgtgtcctattttgccactagaaatgcttttttcacatctgtattttaaaatgattaagggatgatcattattttccctccctcatgcctcctgctccatccaccctgaaaaactaaattctttggccaaaatttgcaagcgcatatagaagattggttagcataactcagacttgcatttatgactgtatgggcaaggacaaagtagactctgtaattgtttagtcatatatgagctatatatatacttcaagtgagtgaaatgttttgttcattctagattttttttatttatgtgttttgggtttggaacccttagaaaatcaaagaaaaaaattgtttgttcttgctatcagctttcatatggttcccgagacaagtgctatacatttagaaaattaaaagggtaaacattaaataagaatgcaggagttggcaagaagtcaaatgaattggatgttcattaaatgcccagggtttggggacaggcaaggttactaaaaactggagcaggcttaatgagacacatcagacttgagttgagtttggtggatgggtaggattctgaatggtgaggagaatagtcttgaaaaggggtagaggagagagggaatgtagtggaaaccagggtagagtcagcatgcatgtggctagagacatgtttcagccagtgggctgggctgcaggaattgaggaggagttgggagtagcaggccactaggctaagaatctgggagtttgtgaattcccagctatgaaatggggccccatttcatagtctgggattactgaaggtttaaagtggaagaatgaaatccagaaagctgagttccaagagccttagtatgatagtagtaaattgagtagttagaatgaagattgatcatattttcttagccaggagaaccaattagaaggctatttaagatatttagggagggccaggtgcagtagctcatgcctgtaatcccagcactttgggaggctgaggcaggcttatcacttgaggtcaggagttcaagaccctcctggccaatatggtgaaaccccatctctactaaaaattcaaaaagttagccagacagggtggcaggcgcctgtagtcccagctacttgggaagctgaggcacgagaattgcttgaacccaggaggcagaagttacagtgagctgagattgtgccattgcactccagcttggacaacagagtgagactctgtctcaaaaaaaaaaaaaaaaagaaaaaaaaagatatttagggaggagctatatttgatggcagtgcaaatggaaagataagggatgggcttgagatacaccagaggaagaattggtgtgatttagtgtggtataattaaaatgccaggtcattttctagtaatataattaatatttaattaattaacagtagattaatacaaactaatttctaaacataggctctggaatcagactgcctaagtaagcagtaacctccacattgacctcaaaaaagtaacttaactgactgagcctcagttttctcatttgttaaatgagaatagtaatacccaccttggaagatttactaagaattaagtgagatttaattcttatttatataagaaagtccttggcatgatgcccaacaaatagtaagagtgcagtgtattttaactataatcattagcgtccatattttaaaatgggaatttgattacattgtggtttgttgtaagtgctgaacatacctgtgcttttcttatggcaggtatagtaattgtgttaactaataaaacggttattaaatatgttcaatctgtctagtatttgtagagtttctgttgtttgtattcacattattctactatttgatatccagtagcccagagaagatggtgacaacccctggcagggacacgcacctcctctgcgggccactgagaattggacaataggatttagaatcagtggtagagctggacctggaatccaggcttcttcattgtcggtaaaggtctgtttcccaatatgaggcatcataaattaaggtaggagacagaagaaaacatataattttttgggggtcttttttttttcttgattatagattttatttattttttatttttctataagttattggggtacaggtggtatttggttacatgagtaagttctttagtggtgatttatgagattttggtgcacccatcagccgtatacactgtaccatatttgtagtcttttatccctcacccccctcccactcttccccctaagtccccaaagtccgttgtatcattgttaggtgtttgcgtcctcatagcttagctcccacatatcagtgagtacatacggtgtttggttttccattcctaagttacttcactttggatagtagtctccaatctcatctaggtcactgcaaatgctgttaattcattcctttttatggctgcgtagtgttccatcatatattcatatatatatatgatggaatatatatatatatgatggaatatatatatgatggaatatatatatatatgatggaatatatatatatgatggaatatatatatgatggaatatatatatgatggaatatatatatgatagaatatatatatgatggaatatatatgatagaatatatatatgatagaatatatacatatgatagaatatatatatgatggaatatatatatgatagaatatatatatatgatggaatatatatgatggaatatatatatggtggaatacatacacacacacacacacacacacacacacacacacacacaccacagtttctttatccactcattgatcggtgggcatttgggttggttccacgattttgcagttgtgaattgtgctgctgtaaacatgcatgtacaagtatcttggaaaacagagaatttcttaaagtctctttatctgttcacagatatgactggctaacctgcgtttttctgtataattgttctttccagggtatatagtatgtcctttatgttggtggatgtttttagcccaacctttttacttggttaattccgactttactttcaacttaaatgccacccaatctaaatgacttttacccttttttcttagccactacgtattttctttagagcgatttttataccttgtagtcctatatttgtttacctatttgtttatttatacccatctcccccaccaaacttttaggtccatgagagcagagatcatttctgttttgttatttagggtacttggtttccggtataatgtgtggcatataataagcaataaataggaatttgagaatgaattcatgaattagagaatatgtaatattcagacatatgtcaaagggcatggtctctgcttttgctgataaaaccaacttggattaacattattaaaactttcagtgctatactttcatcatctaatatggacagaataataactacctacatctacttcacagaaatgtttttaggataaatgagatactgaatactgttttctgcaatatctagaaattaggcctacatcataaactgggtatttagggaacttccctgttccacactttgagatgactaggaaacccctttctgatattagagctccaaaaaggctaccagagtggccatgcacaatagtgaccacaagggtgaacagactctctgagcccttccccttcctgccaggcaatgcctgactctgcagaacatatggatcacaacctaatgtgtgtggaattactctgctatcttcagaaaaagagcatcgtgcatatctaatgccatgttgatgatggtagtagtactgcggagaggctgctgatgtgatgatggaaccaaagttgtgaggtaagaagatcctttagaagcaaacaccttccagatcctagccctataaacagcaactgggtgtctggtaaatacagcatcggcttgaatagacatatttgaataaggttttctcaccatagcctgggcttctaaagagcttggtagaatattttgattgttgagatcatcccctccccatctttaaaaaagatatggatcccctgctcctgataaacacaagaaaaaatataaactgtaaatatttatgtgatgaaaattatattaaatatttaaagaaactgcagagcattgcttaatcatcttattaagaatcctagatttaaaccttagatgtctgttcttaggcatgaaggaatcaggttaaactgccttaaaaataaagtgcctcacagttgtatcataaaatatcaactgacattaaggtaattgtgcttaagcacaacttagggctcttctgaatatttgtcattgtcacaataatggtgctatttttaatagtccaatcctagttctaaagaaataaactatattctttgtgtgtgtcctaaacagaatcatgactagggagaaaatgtagactccgaattctttatcttagtaaaagaagcacagaaccacattagatatgggttctggtatcattatggtgtttttgttttgttttgttttgtttttttgtttttaatgaaacattctaaagggctgggtgcagtggctcacgcttgtaatcccagcactttgggaggctgaggcgggcggatcacctgaggtcaggagttagagaccagcctgtccaacatggcgaaaccctgtctctactaaaaatacaaagattagccgggcatggtggtgggcacctgtaatcccagctacttgagaggctgaggcaggagaatcacttgaacccaggaggtggagattgtagtaagccaagatcacaccattgcatttcagcctgggcaacaagagtgaaactccatcttaaaaaaaaaaaaaagaaaaagaaaaagaaaaaagaaaacaaaacattttgtagtaggagcctgcctagtccagggtagtgtaacactcctaagagtctcagccatttcctacgttaggatcagttttacagatttgagtcaaactgatgtctgagtcttcgttaaccttcagagagccatgaaatcaagtgcagatttctaagccccagccactgggccctagcaagctcatgttgagcctttatgaaattagaaaaggtgttctttctgagcggataaagcccaaaccagagcacatggcttggccgtggtgagccaggcctgaactacattcagcaccacttgccactttggtggcactttgggcagtgcatatgttgagcaccctgtccccagaaggaccggacccaaatctctagccagaacgcaagcactgtttacaggcaacccaggaaccatgttatttttcagattgacattcacgtcacaatgctggtgcttttgagtatgtgatctgcttaagtccacagtggtcttttggcctttgagccccaaatcctcagagttcatggcatgatctcactatatggaacagaaaagtgtttcattttatgtcgaatttaaataatatctgggaatatttgctgttgatttttttcctcctgctaccctctctcatgttaggccaagaaagccaatgaggttaaactacgactgtccttttttaggatctgctaataatttagatagaggctgatgatttatcaccaccttattcaggctgtaataatcccctatccacttggatctctgcagaacctcttaactgatcttctctccgccaacctgttctttactccaactcatggaaagtcacacttgctaatgatacgtcattgactttctcctgggttgaaagaacatccaaactcttttattttattttattatactttaagttctagggtacacgtgcacaatgtgcaagtttgttacataggtatacatgtgccacgttagtttgctgcacccatcaactcatcatttacattaggtatttctcctaatgctatccctcccccagccctccaccccacaacaggccctgctgtgtgatgttcccctccctgtgtccatgtgttctcatgaaaatccaaactcttctacacggcctgccaaatcttgatcaaaaccctacaggacgtgccaggcctacatgacgtgtctccttttcccttcatctctgactgcatctcctctctccctccttcacttgttcaactttggtcacactggcttcttcgctgttccttttccctgaaaaattttgccttcacatctcagaccttgactcagaactcatctcaatgactcttgccctgactgctgtatctgaattttcagcctttcctcacccacaccatttcaggtcctctttctccactttgtcttttcttccttaaaaattattttctggctgggctcggtggctcatgcctgtaatctcagcactttgggaggccaaggcaggtggatcatgagttcaagagatcgagaccaccccggccaacatggtgaaaccccatctctactaaaaatataaaaattagctgggcatggtggcacaggcctgtaatcctagctactcaggaggctgagacaggagaatcgcttgaatctgggaggtgtagtttgcagtgagccgagattgtgtcactgcactccagcctggtgacagagcaagactccgtctccaaaaaaaagaaaaagaaaattattttctaatatatttcgtattttatttagtgtgtctgtttctcttccaccaggatttaagctccaccagggtaggggtttgtctgttttattcagtgttgtatctccagtgcctaggacaaaaccaaacatgcagcatatggtcaagacctattagttgagtggaggactgaatgaacttggcccctgcctgcctctctaccctcgtgtgtcatcagacttcttcatgtcctacatgcccacatcttttccatctttctgctctctctaaacacgccatgctttcctccactctctgtgcctttctacttactgctgcatctatttagatggttcatcttcacctgtttggctcttcaggcatggctcagaagtcacctctgctagaaggactgccttagccccctgctgtgcaagtagagtaccctttcccagcatgggagcaacctgaatgccttacttttatccttttgcctagctcttccattaaaccacataagctccttgagggtcttatttggatttgtagtctcagtctgcacatagcacagtataggcatgtcttaaatgtttattaactggagaaaggagggacagaggccagcatagaactggaagattatttcaggatttcatccatccttagtctacctagtctacctaccatgttgccacgtttattacagtaggtgctcaagacagctctgaatgaatgagttgtttgttccctcttacacatacccacccctaattaaaaattcaaatcatttttgtatcaatattgtactttgaaaagatcttctgaattgatggcttctaacttcaggttgttggccagatctggatgtggtcagataaggtagatgtaactgtttcctgagtctaaaacctatcaggatgcactggttgggaaatggatagagcaccttagtgtattttctgagaaacacagatcagtggttttgcttacctgtgtgttgataatgagtgctttttctgcgtgcgtactttatttcttcgaaataggacttacgtgaaaacaaagtggcttaatcattcaattacagtttcctctatgaaatttttcaataaaaatgaaataaagcaggggagctctaagtctgtttcatactctgcagtatggatgatcaccaggaaacattttcttaatggcatcataatattctgaatgttatttatactaatgatcacgaatttcatcttagtgatgcctgtaaaaaacttaacctacatgttaagttgacttaagacacaacgtttcagactacccagactgaagacacaccatttcagattacccataaagattttagcagcagtgttctgtgactgatttgtaatgatgcttactactcatcattaattgagtagacttgatggatagctatacagaaaaaaaaaaaaaaatgggcaggcctttaccaccctcgaaggatggagcttttggtatttattcgatgcataacctgtattcctaaaagacaagaaatacatcatatgatttctcagtggaccatacatcacagcaggaacacctttacaacctgccaggtaaacacatattaaagttaattctcagaggcttttgttgctttaaagaaatcatatgcagtagaaaattcctcctgttttcacaaccaggaccaacagccagttaatcagttgaagtggtgaatctttaccaaaacaaacaaactacatgttttaagcatttttagctgaaaatatagaaatgtgcattttgagattagccaaggcctttacttaagtatggatggttgtgctcattaaagttctgacttcttacatataccacaactgtgatgtatcaccaagattttcacctcttgctgctttaaagtgaacctggaacttagacatgaataggttgagtgtagaatcatccaatcctccaatattttgcatttgtcttgcccacaccatgtgaaagcaggattgtttttgttttttttttaagggtggggaaaaaaaagaaaaaaacattgtcaggactccctaaagcattcaacttaattttgatagaatgaactttttattttacaatcgtatttcactggtttttataatatttcattaaatgataaaatcgtatttgtagatgaaacggttataatcaggtctgagaaaaaataactgatccttgactaaattgatttgtaaaagcggaagtatgtgagcataccagagtgtagtttattagttttgtttatttagcatgctatggacatcaatatattttaaagaagaaaaacgattttgattaatctggtagcgtaagcatacatgtagtagtaactttttctttgttggtgtttctgtataacttaaaaagagatgaaactaaactgcagtgaaataacccttagagactggtaatccacccctaatgagcgagtgcacatgtgaacaaggtatgatgcatatcttcagctgctcacttgactttttcagttggataaatttccatcctctttcattgtaatatggcccaaactaaattcactgttttcttaagccttcctcccatttcccaggctctcttagaattactgccatttccccagctatcaaggtatccaatatagctagaaaaaaattattttgaaggaatactgcgtgtgctgtaggagttttatgtgtgttttttaaaattattttgacccttacctctgatcctcttaagttttgtcattaccagatcttgtcatttctgagaaatgcatgttcctcttcatttgagtggcctccccagcatgagaccctttccacctgttgagtatatcactgcagtggaaggatcttacttgattagcagcattgcctccagccatttgtatccttaaagctgtggcaagatccttttttcacaaatcccattctcagcagttcactctccattcaagattctcagtggcttttcactgactgcaacatgtaatgtaaaaatatttgtctttgctctcggtgccttgcttaacatagatccatcctcatttcaggtatcagtctctattcttttatgccctgtgggaacccaccacaatcacgttgtctgtctgcgtctctgtcctccagacttgtgctccgcctccacacctctgctcatatggagccatgtggtctgtaggatcttaggtcttatatgccactgattcatgtcctaaaagtccttattcaattctgcttgactctcttccaaggaacactcctccgcaaacctttgagcacctagagattagggactgctcattctgacatgaaaccagctgcactgcattttattgttatgtagttgtgtttatctcctcaactccaaatgaacccctttgaaagttgggactcttctcttaaatgtttctctttttgtagcttctcttcttcagggagtgtagaatactttcaacccagcacaactgtatgaaagacctgattgaggaaacataagaatcactaggccagggtcccttccctctaggtgctcacagtctaatggaaaacagatgtgtccttaaacacacacatacacacacccacacagatacatagacgtctgatatgaagtgagaaaactctaaaatttctactaataaaggtgtgtattagatgaaagtttggaggaaggtgagtgatacggtttggctgtgtccccacctaaatctcaacttgaattgtatctcccagaattcccacgtgttgtgggagggacccagggggaggtaattgaatcatgggggctggtcgttcccttgctcttctcttgatggtgaataagtctctccagatctgatgggtttatcaggggtttccgcttttgcttcttcctcattttctcttgcggctgccatgttagaagtgcctctcacctcccaccatgattctgaggcctccccagccatgtggaactgtaagtccaattaaacctttttttcttcacagtctctggtatgtctttatcagcagcatgaaaatggactaatacagtgagctttcactctaacaatggggagaaaggtctttgatttggaggggttcctacttgaattgtattaaattagacatttgcatttgagcattattggaagaatagaaagatccgtgtattgttttcttgcagaaaaattttttgagggaaggagaaacagtattgttaagtaagaagtaaggaacttaataacttgatcaagttcttgtaactaatcagtggcagatacacgagggctcttgttctactgccggtagttttgagtagtaagttctgctgcctcctcaagttttgttaacattcttttgagtcacctgaacatatgtatgaaatttttagagggtaagaaactttttagcccccgttatgtaacactcaaatcactcaggagtgtttccttttcagagtacttcaaacctgccatggagttagcctttgggaaggagaaaggcaggtaacataaaatatcaactgagaggctttgaagatgggtgatgtgttttttctccttaggatgttaaatcacatatcaccacatgtgtgcatggaaatgaaaaatgtcagcaacacatttatgtaaaccatggatcatatttgcatatacatttcaactcagccttcctaccctgagaccagcaatgattgatgctttgtattttgtctttttaaagatttctctagtcctaggattttgctgcatgttaaaactcttatctcaatgaaaggtaaattagataataaactataaacctatgctgtctagcacagtagccactagccacatgtgtctatttaaatgtaaattaaattaaaaattgatttccttagttgcatagccacatttcaagtattccataccaaattgagatgtgcagtaaaggtaaaataccagattttaaagatgtattacaaaaaccaaatttaaaatactgacaaatttttgtattggtaatatgttgaactgacaatattttggattgttttattaagtaagacacattattaaaagttttgcctcttttacttttttataattgttacttagaagcttaaaattactactgtggatcacatatttctgtttgacaacactgacttagaaagttcatattttaatttttaattctattgtcttagtgtataggtttatactgaatgagcttactaggcattttggaaagcagagtgattagcaatgactgaaacataatatagatgatttaatgattcctaccattttttgcctgtaatttttactgggtctactaatcagttttttgggtttttttttgctaaaagaagcctttatccttgttcaggccatcaccttttaagactgttttggttttgatcttgtttagcctttaatctttgctccttgattggctagtgacaggcaaactgaatgatcgggattaagattcaaatatttcatgaatgctttcactacagcattcctttttataggaagttacagtcaatacagtatataaggcagtacttaatctgtcatatttgcaggctaagccctgaattagatattttagtgcatgaaaagatctccagactaaacgcattcatttgctaattagaaaaaaatttgtttcccactaaaacattttactcagtagtgtttatgtagaaatactgtgaatattcctacaaagttgcttaatttatttctgtgagttccaactaggttcagtataatttttccattagtgtaagtataggcctgctagtgttacgtaaaccctatttagctgttagtactgttgtcaccactctgattacttaaagaggtctctagagcagaaaacagacttcctaacttatgagttgttaatattttattttttatgttatttggaatatcaagatatagtacgttggggagaaaaatcctttgtgaatttgatagaaaattggaaacccaagaaaaaggccattgttaaggtttttggctaatctcaccgaaattgtctgtagtaacccacactgccatataaggcgaggggaaacggtgcctttttgcatgctatggggaatatgtagcttagtagtacaaagataaagcaaagagctccaaagatgcggccaaaaatagtcgtattggggtttttgctgaattgaattgtactgatggctgaatattttccgggattgagccctctcttctaaacttaaatcttgtcctgtttcaccatctatggtaaaatatccatggaaacaaagtggcttcctcatgggttgcttactgatcctgcattaggaaagaccacacagacattcgaggaagagaaagaatatttcatatggctgctttccttgttaagggggacccagagaaatgtttatttctgaatagcttaccttcattccaagaaatcggcttttgggcttacatagcagtggacatgttactggaatcttaagagtgacaagaaattattgtttctgaagatagcttgtcacttttttctcataggacttggctggggttcagtgctctctttggtcttatttgaatggtattttataagtcagacaaaataatattcaactattaatattgttctgctaaaacagtttagaataaagatttaatgttctcttttcagtgaagagcttgtgcccactgtgcagtactgtaataaaagagaaacaaatgaggcagctcaaagttatggctctccgtggcttttaggtctctcatacatttttataaaacatatatcagaacttctgaattgttaaattgggttattttttaagtgcagttgtattcaaataaggacccgagagtaacactccatgtcctgttaggtgtcagcgttcagaactgcccgccccctccacccccagccgacagacttactgctgttattacatcctctggtctgtagctaggagaggacgtttgaccccctcaagactgtgcttctagttgttcttcaagtaaactgactcagccccaggcttactgtcttgcctttaggcaaacaggtaacttgagttacacatctcttttctcatctgtaaaaggggaatatagaaagtgtcacttctggattcccagtggatttaaaaggcaaaaatgagattaacgatgtctatggccaagcatggtggctcacaactgtaattttggtactttttgaggccaagatgggaggactgcatgatccgagagaccagcctgggcaacatagcgagacgttatctctataaaaaaaattaggcatggtgtcatgtgcctgtagtcccagctcctcaggaggctgaggcaggaggatcgcttgagcccaggagtttgatgttacagtcagctgtgatcccaccactgcactccatcctgggcaccagagtgagaccctgtctctaccaaaaaaaaaaattgtctgtgaatctcccaaattgctacagtttaataatttgcatccctatagaaacccaggagaactttaaagaacagaaagtaaactttagtgcaaatatttgagagcctaatgtgtcattaaatgtttctgaggaatatatgtttgctgaaaagctgaaaattagggttagtgtaagcatcactcataataatctcatgaagagaatcttgcagatgacattgcccaagcatagtactgggaggataataaaaggtgtgcgcatttatttgggtgtcagaagattaagtacagggtgtgcttcagtattaattcttcctgccccaacctaaacatttaaccaaataaagaaggaacatcaagtcccacagaactaggaatgatactactattctgatttcaagaagtataattactgtcctaacacttagaaatgaccagaatttaatacccaggtcttcattttcctctgacttcattttcctctggctgaaacaggagtgacagaggccaggatcatcagaggcagatggatccctatggcaggttgttttgactcttctaagttctttgcattaaaacaacattcctcaaacacattagcctcccagcacgggggtggaaacaacaaagcaggaagcctgctggagccttggggaaatcttgagtgctttggggtgatttattttcagaggattcgaactaagatcagctcaagagaagatgggaacattcaggatggtgggaaagcaaagtaactgactccctccttttcctctctgtaaatggtctcctggaaagccatcacaagtaaatgttttattccacataaatttgtacccttgggggtacaaatgggggattgagaagggttgtggactgcctggaacatgcttttttctttttctcttttctttttgagacagggtctcactctgttgcccaggctagagtgcagtggtgtggtaacagctcactacagtctcgccctcgtgggctcaagcagtcctcccacgcagctggaactacaggcatgcaccaccacgcttctctgtttttaaaaatctttttgtagagacagggtctcactatgttgctcaggctagaatgtgctttttaattttaattttttggtaagccctagccacatgaaatgagcccagtggggtggaggaccggccctgacagagcctatatgatcccttgactgggttaatgcaaagttgggtctcttattaaattaagcagaaattccagaaggcttgtggctgggtgatggatttggcctctaaaaccagaatgacccacaaaacaggtttttgagtaacagatgcttaatgaacatccctgacccaactttacaaaaatgcaaactgggctacaagagacttaatcagagcaggatgaaagcccaagttagtgggagatgagtggaagtctcatgtacccaactgtgaaagggcttctttttccaattcagaacaattgtattagatggttatgaggaacgatcatttagatggaagctgaactccctttcgttcactcagtgaaaactaaattgttgggcaggttcagagaaaaaaaatagaaatagtgtgtgtgtgtgtgtgtgtctgtgtgtgtctctgtgtgtgtgtgtgtaatttctctggaagcacaggaatgatgtgttcttctttgttaagggcattatgaaaccacggcagtcctcttcttgtacagtggttgtaattataaccacagggatattgtgttctcaaacaaacattcaagctccctgataccaggttgcctgaagccaagcttcacatatggatgtgtaaaacaatgcctattagtaatctcccccatcacttgtcattggtcttcccctctgacagtggaaatgtctttatagtctgtgcctggcatattgcttttgttcatcttaggttcattatgtctgttttaaacaatgagaacatataggtcgtggcacagtgaaatgtagcacctgaaacttaagagcttgatcgggtatatacataaaggctgtccttcagaaatttcttcatgatgctgttgcatgccattggaacagttggaaaaaggaaaattagaaccacttgcatgccagccagctctgtttttaacgcatgattattttattggggtgtacattaattaatcccgaaataagatcctgtgtgacattcagagttgttttgagtagctcagagtttaaatattttagttttacaactctgttatgctggcagccaacaatggtgtctcagtgaagtcagcatatgagccctgcttgtgatgacatctggaaagcttgttttatctataagcacagttgtagacaaatgaaagcagacagatgtaaggctggggtggcatcttcgcctcgagcactctctggctgtacattttccagtgtgtcaaaaacaaggagctttatttcgggggtggaataaaaacattctgtcacatccctacaccagctactgtgctgccttttttgagctataaggtgtaaaacggcctagactgttcaaaatttaacaagagacagagttaataagtaaacaggagaaagtcagtagtcagatagaggtgcctgagtttggaggggacatgacaccacgtcaaaagccttggggtcattttaagaagttaatcacaaccactttctcctgggagagccagaaagaataaaagagttggcaggggatttggagttctgggtagatttttcttttgccattacctttatcagccaggatttattaagtacccatggcgtatagaaaagtctacaaagtagtttgggtgagtggagcaaagaaaagctttaggacagggtcatgcttgaagatgagtacttagaagcctgaaagtccgtgacatcttccatgggtggctctcaagtccttttgctcagggaccattccttaggaaatcttatacaagggcagcttgccttttatcccactccctttttgctgctgtagaaataagtatccctgaaaataatctccacatatgcgtgtgaatttgcttggatttgagttaaagcagatgcttttcaaagttcttgatcctgcaatagcaatagaattagctatgtggggtatgaaattaatattttcatctctggagatttatggcttcctcctatttcatggcatatactgtgtataccactctgtataccatgtaatcattgctaattattgctaaataagttttaccaaaattttgggaaacctggacatggtcttgtttagcatctgcttaaggactggattgcccacctgcagccaaaaccacatagctttatagtatttgaatcttgtgtcttgaagaaaccatgcagatacatgtaatttgagagcaatgaaataatggaaatgaaaggaagggaatagtatgtaaggaaatgaaatatggtcagttgcttgtatcaggacagaagcctcttggtttcagcagtgtctttttcagtggccaaggtggtagagaatatacttttcattttagcaatcaagttacattatggtataaacaggggaaaaccgagtttttcatttcccgtctcattcccatcacaccatcattaatcctttcagagtgcatggtgttaagatccactgagccctggtaagtgcctttgtgtatacaaaatggcactttttgttttacatgctgttggatgtggtggagaaaatacatgtgtaatcgaaaatggacagcaaattgccatttgtacctgcaaagactaaatggtccagaaagatggatagttggggtgttagtcacacatgagtagactgatgggctggccacggaaagccccggacctttgcatgacttttcacttagagccatctgaggggttcagtgactccgtggctgttctctgagaccccagtctggtccagagagtcctggagtctgaagtttgtgatgatacagaggttgattcctctgagtttattcatttaaattagaaacacagagggaagggaatcttttcttgtgatcccagttattcctgatagagaagaagtagcagattttctaaattatctgccggctgtggggttggaaagtaagtaagattatatgtctcatcatccttctatgagtatgtagaaacgagagtcttagaatcagtgtctgcaatcaccttcatcggtgctagcttacaatttaaactgtcaaaatagactttatttccttcttttgttgttcaatataagaagagggttttttttttctgcctattagtttgagtttctatagatgactatttatagcatttttttaaaggtttcccaacactattgggttgacacaatgggatataatagccaacagggaccttgcactgataccaatttgatttatttataaattaaattattctgctaaatctgctgtagtactatttagtcattttgatttaatcagaagtatcctttatgatgcaatctgctggaagactgtgtttggccaagattaaacttattcttttgaaaacattaaaacacaattatggatctataatttcccctgtggtatcagtgaacattagttattattgacatatattggtcttctattattactaatatttttattactgacaacagtttttagtatttagcatgtgccacatatagtgctaaggtttttatatgtgtttgtagctaacatttattgagtacttattttattacacatactttggagctcagattatccagtataattcacataatgatcccgtgaagttggtactaagattatagtattaccctcattttgtcaacaaggatgtaggttcagagaaattaattatcttgtctaagatcacacatattctttgcatattggactgtatgtgtttgtgtataggcattaatttcattctcagtgtagatctgtactttcttttccaaatatattataaccacactgtaccttgtacatgtaatttttactcagaaactaacaacttgttggctttaaaaaatactcattgaaattgaacattgcttcagtttctgaaatgaaaataaccagttcctaagttagcagtgatatcagcgatggtgtgtccggaattggtgggtccttggtctcactgacttcaagaatgaagtcgcggaccctcgcggtgaatgttacagctcttaaggtggcgtgtctggagttctttctgatgttcggatgtgtttggagtttcttccttctagtgggctcgtggtctcgctggcttcaggagtgaagttgcagaccttcgtggtgagtgttacagctcataaaagcagtgtggacccaaagagtgagcagtagcaagatttattgcaaggagcgaaagaacaaagcttccacgatgtggaaggggacccgagcgggttgccactgctggctcgggcagcctgcttttattctcttatgtggccccacccacatcctgctgattggtagagccgagtagtctgttttgacagggcgctgattggtgcgtttacaatccctgagctagacacaaaggttctccacctccccatcagattagttagatacagagtatggacacaaaggttctccaaggccccaccagagcccaaaccctgagctagacacagggtgctgattggtgcgtttacaaaccttgagctagatacagagtgccaactggtgtatttacaatccctgagctagacataaaggttcttcacttccctaccagactcaggagcccagctggcttcacccagtggatcccgcaccaggctgcaggtggagctgcctgccagtcccgtgccatgtgctcgcactcctcagcccttgggtggtcgatgggactgggcgccgtggagcagggggtggcacttgtcggggaggctcaggccgcacaggagcccatggagggggtgggaggctcaggcatggcggactgcaggtcccgagccctgccccgccggaaggcagctagggcccggtgagaaatcaagtacagcgccagtgggctggcactgctgggggacccagtacaccctccgcagccgctggcccgggtgctaaacccctcattgcccggtccagcagggccggcctgctgctccaagtgtggggcccgccaagcccacgcccacccggaactccagctggcccgcaagcgccgcctgcagccccggttcctgctcccgcctctccctccacacctccctgcaagccgagggagccggctctggccttggccagcccagaaaggggctcccacagtgcagcggtgggctgaagggctcctcaagtgccgccaaagtgggagcccaggcagaggaggcgccgagagtgagcgagggctgtgaggactgccagcacgctgtcacctctcaatgggatggtaatgatttaacagattgggttttcatcaggcagagggttgtttttgtttgctagagaggctgtgcagtgtactgagaagccgaaaagtgtgcagtgctaggttgccagagtttgaatcccatttctgccacttgtgaggtctttgactctttatgccccatgtttcttatttttaaaatggagatgataatattaaaagtacctatttaatggagatgttacatgtatcgaatgatgttacctgtgttgaatgttgttacatgtgttgaatgaacttagaatggtacttgccacatagtaaatactgaatattataatagctgctatacttattttatgataataactttagctgattcatgggggaccacaagtagcttgcaaataattttaaagattttagaaacatttggaaactgtcaaaggtaagtattcttccaaaggttaagctgttacagataacattttagtatctttgtgccgagctattaaaataaacataaataatctaacaaatattttacccaacgtgcataaagaaagaagtcagatcttaaatgcaagcaaaattatattagcctaacttaagcacttgaaatgtttatttctgtactttaaaaatgagtgctgacccagtgatatcaggaactttccccccaaaattgtaaattataggactgttatgctgatcaatgatacataaaaaagactcttacaagcaaatgtaataaaatgttaattgtagaatttagatggtagatacataagtgctcactgtacaattcattcgacttttctgtgtatttgaaaattttaataataaaatattgaagaggaaggctcttatacctccctatcactgaagggaaaatgaacctttttgaaacttgaaaacttttgctaggtgctgtattctttggcatgagagatagcagttgaagtggtctgaaacacacacatgaacacaccctctgaaatcccattttagtcaaagttggggataaatttccaaccaccaattttttcttttctttttctttttcttttcttttcttttttttttttttgagacagagtctcgttctgtcgcccaggctggagtacagtggcgcagtgggctcactgcagcctccgcctcccagattcaagcagttctcctgcctcagactcccgagtagctgggattacaggtgtgcgccaacgcgcctggctaatttttatttttttggtagagacagggtttcaccatgttgaccaggctggtctcgaactcctgatctcaggttatctgcccacttcggccttccaaagtgctgggattacaggcgtgagccaccgtgcccagccccaaccaccaagtttttcttttttggagtcctcttggtttttgtgaattgaagtcccatttgcttattggtcatctgtttaatatcagggtcatgcttcttttctttagtccgagcgggaagagctttgagagatgagaatgcagggagccacaaaatagttacttcaatttagaggtactcttacacactgacattcctttttgacctagaagagtttgccagcagctgtatggttaatatggagttcacattttctgaagctaataagcatctgtacattctgtgatctacacttacaacatctaatggtcctttcctcttataatttgtggtaaaagatgtttttaagctgaatattctgttacactaacactgttcattgaagaataagatcagaaattaggttatagattacatctaaaaaaaggcagtattttataaccatgtggaagaaatattaagctgaaaatgtttgtattttgtgtcatttatgtcatatgcctttttaagaaaaagtgtctttgctcattaacaacagaattacggtggtattatctccttcttcacagatcacttctgggatcttgcttttaattctgggtaccactgtgtatgaggagcattgagcaattgaaatgtgatcaccactcatgaccagggtggtgaagggtctgcagactgaccacggggaagccattgacagtgtttggcctggagaaaagcctgccagaatggagtcctcctccccatctgtaagggcttccacgtggaccaggaagcatattgcttttgttaatatctcagaggaccgaaatttatacgaaggcagatttcagcccagtggaaggaaagacatagaacagttcgagccatgaaacaatgaaatgaactacctcagactgtgatgagccagatacagctgggttttttttcctgcctgactactcctgtcatctgtttgcaggatatggaaagatgcaggggcccgctcaagtctttttctaaggagaaattttagttcctaagcacctaaaaaaagacatgctgagaagttcaaattgggggccaggtacccccaccggaggagactatcccctttgttctatgagttgcttctaaagtaggagccaaaggaagtttccctccaggcctactctgaggatgcctgtccttttgaaagcattcaagaaaaaacacctcttgattcaggatcatgatacaaagaaatagagatatcaaatttttgataaaaaagaaaattctataatgttaaaactgaaatgaaatataattatatatgtttccccatgaatatttttaaactttttttagggttataaggaaatagtctagatatattaaatgtctaaatgaagttcttagcttttcagcaagaagaaatagctaaaaatttaaagtcaggaagcttacaaaacagatccaagagagtaagagacaaataactaattctttttgaaaaaatgtttaagtttgccattaataaatgattgtctaagtgagacagctttggctgttgcttagacattttaaaatcttgatttgttaagaaaatcaaggactttttttttttaatctccttgtcacattgttatcaaggaaagattttctttaaaagccaatactagaccctaaaggtaatcaaagagtattccgaagctgcatgatagttttaaaattttctctttttaaaggcagtgtgttgctctgtcacccacgctggagggcagtggagtgaccattgctcacttgggaacctccagctcctggcctcaagtgatcctcctgcctcggtttcccaaagtgctgggattacagacccaaatgatactttggctgttcttcagggagaggtctttttctctcttgctccttttcttcctgtcctctccttttctaccctgatggagcaacatggtggtttgggacacttgtatttaagttctcattgaatatcggggttcctcttgaaggctcttctggatcctacattacttctgacaccctccctgctaatgttctttccctaccacagacacatgtaaaacccacaaattggacaatttttgtacatttcaaaccccttgcatcattatgcttttttcaaaaatacgatttcaggaatgatcaccttgtaatattaaatagctgtagaaaatgacagaaatttggcatgtataggaagaccattggatcacagtagattaactcagcattcagtcatttgacatgtattttttgggtgcctactatgtgccaaagctgagaggttctagaagttaaaatggtgagctagataaacccgtggtccctgctttcttggagcttacagactagggggaggggacagtgtcaaactgccagagtttttttttttttttaaaaaaaacaacacacacacacgggttaaaaagcaagttatctagagtacttctggaatcacttccttgacaaagtgagctttgagcagaggtctgaaggatgagttgcaattaatgaggaaaatggtgatgatgaggggtgagatacttggagaagcatggcctgctgaaagaactggccacggcgacctaaagggagcacctcaggtgtgtacaggagaaactccagggcggtgtgggagcctaggtttagatacgcattccccctctttgctctgctgctgtttttaatacttcttccagaacttccctaggattatcttccacaggggagtagatactgtttttattgtaatgaatcatcatcctctattattgcaagtgatgaaggcttctagtagcagtggaactaggaatggcgtcagtggctcagctcttgatggcagatctttagggggaaaccctttcagttttaatggtggataaagcaaaactcctcgttctcatcagtttcccctctaggctgtcctgggtagggagttgataggagatcttttggacacgggaattgcttcactgttgacagaaagacatggtgcatttgattaaattaaattaggagcatgtgtatgcttgacaaagtgagctaatgaaggaaaatgcatcaaaaggatttatggtgaattgattaaaatttttctttccagaaaacccttccagcttaaagcttggaattgtaaggctatcggtgctgctaggccctctaggttctcacttgcctttacagtaggcagtttggagacttttctttgagcagctgctccttctgtagcatactctgttgcaggcaaaagtattcccaacctgcaatctgaattgtatggaggaaaggggataaaagacactgtttgatttattaatttctagtggattagaactacaaatgtttgctatgtttttaatttgagaagtagagagaatcacagcagcttttaattatgcattttgtgtaatgcagctctgaatagagcagaacaaaattaaaattgtggatcaaataccgaatctgagtggatgcttaagtgagctgtagcgtaatgctaatggttttgcgtcttcctggcattatgtcaataatggctgtaatcacattaagtagagagcccattagctttttctttgcagcagcatgcaccatagcaacatagtgtgagtttctaaaataacttttgacattgttttaaaaaacatagccatgtttagggtaagaggcaagtatatataatgtgtacaggtgaacacagatgtgttcacaaggctatgttatatgtacagtaagatcatctattatataggcacattaacccctgctaacattatggcttggaaaaatctaacccagtgtccttatcttcatgaatttaatagattctctgctattttcacgagagtaaagccttcctggagttcaccatggtgtaaagtcagacctactttctgaatagtgttgtacctagagtgtggaaaagccttttaatatttccctcctttgctgcaatctcatatggcatggcatttccagctgtccaggtctatgtagttctttctgtgttgaagctggaacacagaagtctgattgaagttcttttgctttaatgccattttcagtaccttttgatagagagctcccaagatgagcccaccatgtggtgttcatcatgggtttttttaatgactgggagattagaattactatggtatgtgaatattccttctacaaataactcagttttgggatattctctgagtagttaaacattctaccaatttgattttttttcaacgaaagcttcaagtgcaattaaaacactttgcgtttttctattacactatatgaagataaactaggagtcagtaaggcaattttcaaaacaaagtgttgcagagatactttattctcagtatgtgtattaataacttgactcatctttctcatcaaaccttctccccaccagcacatacctggaggacatccagggtgcaatattgagggttcatctcccatgctctcctctttgtcacctcctctattcaattacaaaacaaaagaaagaaaaatggtgctgcctcagccatctaagtaaataccattgcctcagccttctaaatagcccttgaacacttttctcccttcattcaggtcctcattgtctcttgcctattttcacatctaatgttcccaagtgttcttctttctgctgtttcatgaaataatttttaaaaaacaacatatagtgatttgtatgtggagttaatttattttttcctgggagatattcttttcaattaggatgtataatcctaacttttattcagtatgcaaggataagtgacttaatttttacagctgatcactgtgcattctgttagtgcagttaaaaattacagttctctcagaactttaaagcaaatgctacatcagtcaagattgggtgtctttgtttatctttggtatcaaagacccagagaatttggagaaacatcacacagcttgaaaagttatttagacaagctataatatcacatgactgccccctgagtggtaagacattgcccagtggatctgaaaacacttttaagtacttaatcatcatcgtatcttttttaaattttttatttcttatttatttatttttgagacagagtctcgctgtgttgcccaggctggagtgcagtggcacaatctcggctcactgcaacctccgcctcctgggttcgagtgattctcctgcctcagcctcccaagtagctgggactacaggagtacaccaccacacccggctaatttttgtaattttagtagagacagagtttcaccatattggtcaggctggtctcgaactcctaacctcaggtgatccacctgcctcagcctcccaaagtgctgggattacgcatgagccaccacgcccggtcccatcatcgtatcttcatgagatagtcaggaatggaatttgaatactttaaattggaacatggagaggtgaggtgactgtctaaggttgctttgacagtggtggagctgggatcaacacttttatttttatattttaaaatatacttcctcttagccttttaattcagaaaagttaactttagtttcttaaaggaattcataagtgctacctcatatccctgtatagcagtcttacctttacagagcactttccggtttgtttcttgttagaaccccacaagggaaaaaagtaggatccccttctgaagatgagaaatttgaaggatggtcggttgttaaagaatctgaattcttctgactcttcgtccatggcattccactgtataatgctaattaaaatagtttcttctcttctgcagagatgtaaggttccactgtgacaagtgccattttgtctgcccacacactaggaacacctcaatagggaaagaagtaagagccacctgatttgctcttcttgtatcatgcttagctccaaagtagtctcccagatgtgtgtccttttccactgttgtctcctgtctgtctagatgtgccttgggactctgccatagtatccacatacagctgctgcctctctgtggatgacccatgtccatttcccatgcttccaccttccttctgtaccagttacacattttcaaatgtccactgacttctgatgcctgttggcacgatccacaaatccatatcaacataactaaaacttaattttttatatttcacccctttcattaagtagctgtttctcataacttccaacattaacctttcatttactattcattgagcctccaatggctgaattttctggtgcatctcttggcatttctaaagttccataaagcagcacttgcctctaagagatgtaaaaagaagaaggattataagaagtggaccattcttggattttagaagtttcactatgtttgaaggctaagaggctggtttaggactgagtgaataggcgagccagtctggaaggagttggaaggtaactaagccatgtgacctcttctgaatttttatcctaaaagagtgcacagcctgtagaggagagtaggtatatataagaacctaggtgaaggtaaagctaccagaacatgttttgaaggcttagatctcagtttttcctaatttccatcattctcactgacaaatgcagggcagcacctcatgtaagcttactaccagcttttctatttacccctgcaactctgtctcacactgaccctttctcccctctttctcctaggaagtgagaggggaaggagaagtaagatgagaaagcagtgaggttatatacctgtactgtccagactcctttccctttgtgttactacaggacaatatagtgcttgtgaggcctttggaatatatccttacagatcttaagaaaatcatgtattagttcgttttcatgctgttgataaagacataactgaaactgggaacaaaaagaggtttaattggacttacagttccacatgactgggaaggcctcagaatcatggtggaaggtgaaaggcacttcttacatggcagaggcaagagaaaaaatgaggaagaagcaaaagcagaaagccctgataaacccatcagatcttgtgagacttattcactattgcaagaatagcacggcaaagacccgcccccatgattcagttacctccccctcggtgcctcctacaacatgtgggaattctgggagatacagctcaagttgagattttggtggggacacagccaaaccatatcattctgcacctggcccctccaaatcttatgtcctcacatttcaaaaccagtcatgccttcccagcagtcccccaaagtcttaactcatttcagcattaacccaaaagtccacagtccaaagtctcatctgagacaaggctaaagtcccttccgcctacaggcctgtaaaatcaaaagcaagcagctgggtgcagtggctcacgcctgtaatcctggcactttgggtggccaaggcgggcggatcacgaggtcaggagtttgagaccagcctggccaacatagtgaaaccctgtctctactaaaactacaaaaatcagctgggcatggtggtgcatgcctgtagtcccagctacttgggaggctgagtcaggagaatcgcttgaatccgggaggcgggggttgcagtgagccaagatcgtgccactgcactccagcctgggcaacagagtgagactctatcttaaaaaaaaaaaaaaaaaaatcaaaagcaagctagttacttcccagatacaatggaggtataggtattgggtaaatacagccattccaaatgggagaaattggccaaaacagaggggttacagggttcatgcaagtctgaaatccagcagggcagtcaaattttaaagctgcaaaatgatctcctttgactccaggtctcacatccacatcacgctgatgtaagaggtgggttcccatggtcttgggcagctccgcccttgtggctttgcaggggacaacctccctcccagctgctttcatgggctggcattgagtgtctgtgtcttttccaggtgcatagtacaagttgtcggtggatttaccattctcgggtctaaaggtcggtggccctcttctcacagctccacgaagcagtgccctagcagggactctgtgtggggtctccttccctatgtttcccttttgcactgctgcagcagaggttctccatgagggccccgcccctgcagcaaacttttgccagggcatccaggtgtttccatacatcttctgaaatctaggcggaggttccgaaacttcgattcttgacttctgtgcatctgcgcacagaacgccatgtagaagctgctaaggcttggggcttccaccctctgaagccacagcccaagctgtatgttggcccctttcagccacagctagagcggctgggatacagggcaccaagttcctaggctgcacacagcatggggaccctgggctcagcccatgaaaccacctttgccttctgggcctctgggcctgtgatgggaggggctgacaggaagttctctgacatggcatggagacattttccccatgttcttggggattaacattaggctccttgctgcttatgcaaatttctgcatctggcttgaagttctccccagaaaatggggttttcttttctatcacatagtcagcctgcaaattttttaaacttttgtgctctgcttcccttataaaactgaatgccggctgggcatggtggctcatgcctgtaatccaagcactttcggaggccgaggtgggcggatcatgaggtcaggagattgagaccatcctggctaacatgatgaaaccccatctatactaaaaatataaaaaattagctgggcgtggtggtgggcgcctgtagtcccagctactcaggaggctgaggcaggagaatggcatgaacccgggaggcagagcttgcagtgagccaagatcatgccactgcactccagcctgggcaacagagcgggactccatctcaaaaaaaaaaaaaaaaaaaaaaagaatgccattagcagcatgcaagtgttgagtgctttgctgcttagaaatttcttctgccagataaccctaaatcatctctctcaagttcaaagttccacagatctctagagcaggggcaaaatgctgccagtctctttgctaaaacataacaaaagtcacctttgctccagttcccttcaagttcctcatcttcatctgagaccacgtcatctgaattttattgtccatattgctatcagcattttgggcaaagccattcaacacatctctaggaagttccaaacttccacattttcctgtctgttgagccctccaaactgttccagcctctgcctgttacccagttcctaagtcgctttcacattttcgggtgtcttttcagcaacgccccactctactggtaccaatttactgtattagtttgttttcatgttgctgataaagacataccagagactaggaacaaaaagaggtttaattggacttacagttccccatggctaaggaggcctcagaatcatggtgagaggcgaaagccactgcttacatagtgacagcaagagaaaaaatgaggaagaagcaaaagcagaaacccctgaaaaacccatcaaatctcgtgaggcttcatcactatctcgagaacagcatgggaaagaccagcccccatgattcagttacctcccccgggtccttcctacaacatgtgggaattctgggagatactactcaagttgagattttggtggggacagagccaaaccatatcaaatcattagtactgtttgagagcatgttcactttttctgagctgcttattgctgtaggtgaaagcaagttttactccttataaactaaaatttagtcatatacagtacctagtttgttagcagtgtttaaaatataaaaagcacacacaggtataaagtataatgttccatagcacataagctgaaaagctcataattaatttttaaaatccaagattttaactagatatattcattcagcaaacattttcattagttttctgtgaatataagagtgaaaagttactatccctgttgtcatgcaaactgacaattgcaatgctatgtgatatttgtattattggggatatggacaactagaggtatatgagtatgcacctcagtgtcacatttgggcctagatacctcctctgccttctgttagctgtgtcaccttgaataacacttttaagcctcttaaacctcagcttggagatgataatagtacctaccttctggtggttgttggggaaattattcaagatactgcatatagtccgggtgtggtggctcacacctgtaatcccagcactttgggaggccgaggtgggatcatgaggtcaagagatcaagaccattctggccaacgtggtgaaacctcgtctctactaaaaatacaaaaagtagccaggcgtggtggtgcacgcctgtagtcccagctattcgggaggctgaggcgggagagttgcttgaacctgggaggcagaggttgcagtgagccgagatcatgcctctgtactccagcctggtgacagagcgagactccatctcaaaaaaataaaaaataaaaaaaaataaagatactgcatataaaatacctagcagaatacttggtggaaaacaaatgttcaaaacatattagctattgttattgtaactctagtagcgaaaggagtctctaagtgtgtcttgggcagtcaaggaagactttgcaaaagaggtaggtagcattcaaagtgatgctcaagaaatgagtgtagggccaggcatggtggctcatgcctataatcctagcactttggagggtcgaggcaggaaaatcacttgagcccaggaggtcaaggctgcagtgagccatgttggtgccactgcactccagcctgggtgacaggtgagaacctgtctcaaaaaaaaaaaaaaaaaaagagaaagaaagaaatgagattaggagtttttcaggaacacagtaacagaacagcatccactcaaggatagaattggaagaagtgatagcatgttccaggattttgtgcatcagtatttctgaagcataagaacctggtcaggcaccagatcatgagagaccttgttatccagaagatggcatttttttttttttaattttttttttttattatactctaagttttagggtacatgtgcacattgtgcaggttagttacatatgtatacatgtgccatgctggtgcgctgcacccactaacgtgtcatctagcattaggtatatctcccaatgctatccctcccccctcccacgaccccaccacagtccccagagtgtgatattccccttcctgtgtccatgtgatctcattgttcagttcccacctatgagtgagaatatgcggtgtttggttttttgttcttgcgatagtttactgagaatgatggtttccaatttcatccatgtccctacaaaggacatgaactcatcattttttatggctgcatagtattccatggtgtatatgtgccacattttcttaatccagtctatcattgttggacatttgggttggttccaagtctttgctattgtgaatagtgccgcaataaacatacgtgtgcctgtgtctctatagcagcatgatttatagtcctttgggtatatacccagtaatgggatggctgggtcaaatggtatttctagttctagatccctgaggaatcgccacactgacttccacaatggttgaactagtttacagtcccaccaacagtgtaaaagtgttcctatttctccacatcctctccagcacctgttgtttcctgactttttaatgattgccattctaactggtgtgagatgatatctcatagtggttttgatttgcatttctctgatggccagtgatgatgagcatttcttcatgtgttttttggctgcataaatgtcttcttttgagaagtgtctgttcatgtccttcgcccactttttgatggggttgtttgtttttttcttgtaaatttgtttgagttcattgtagattctggatattagccctttgtcagatgagtaggttgcgaaaattttctcccatgttgtaggttgcctgttcactctgatggtagtttcttttgctgtgcagaagctctttagtttaattagatcccatttgtcaattttggcttttgttgccattgcttttggtgttttggacatgaagtccttgcccacgcctatgtcctgaatggtaatgcctaggttttcttctagggtttttatggttttaggtctaacgtttaaatctttaatccatcttgaattgatttttgtataaggtataaggaagggatccagtttcagctttctacatatggctagccagttttcccagcaccatttattaaatagggaatcctttccccattgcttgtttttctcaggtttgtcaaagatcagatagttgtagatatgcggcattatttctgagggctctgttctgttccattgatctatatctctgttttggtaccagtaccatgctgttttggttactgtagccttgtagtatagtttgaagtcaggtagtgtgatgcctccagctttgttcttttggcttaggattgacttggcgatgcgggctcttttttggttccatatgaactttaaagtagttttttccaattctgtgaagaaagtcattggtagcttgatggggatggcattgaatctgtaaattaccttgggcagtatggccattttcacgatattgattcttcctacccatgagcatggaatgttcttccatttgtttgtgtcctcttttatttccttgagcagtggtttgtagttctccttgaagaggtccttcacatcccttgtaagttggattcctaggtattttattctctttgaagcaattgtgaatgggagttcactcatgatttggctctctgtttgtctgttgttggtgtataagaatgcttgtgatttttgtacattgattttgtatcctgagactttgctgaagttgcttatcagcttaaggagattttgggctgagacgatggggttttctagataaacagtcatgtcgtctgcaaacagggacaatttgacttcctcttttcctaattgaataccctttatttccttctcctgcctgaatgccctggccagaaccagaagaaggcattttaattgcatactctgtaccagtcatctcctaagtggaactttttttagatagctaatttaggcagtttattgagatatgttaagaaagtgttgaatttctgttgatttttttccttatcttgttataatttgtcttataatattcatgttatatgtgtaatatatttataaggcattaaatattagtattgtaagtacgtgtatgtaatttgaacgtgatagtcaaccagtatacaattgtgacccaataattgtttttatggctggtgtttgttctaatcagtaatggcatgttggcatctgttcagattgattgttgccttgttgcctggccctaccggttattaacccttttttttttttttttttggagttggagtctcactgtcgcccaggctacagtgtagttgcacaatctcagctcattgcaacctctgccttttgggttcaagcgattctcatgcctaagcctccatagtagctgggactacaggcgcctgccaccacacctggctaatttttgtatttttagtagagatggggttttgccatgttggccaggctggtcttgaactgccgacctcagatcatccacctgccttagcctctcaaagtgttgggattacaggcgtgagccgccaggcctggccttattaacacatttcaatcttactcctgtaaatataccagagtggcactgtgtgctaatattttgtaactgatcatgggcctgttgactactcttctggaagacagggagccattacagaactttgggcaagagagtgaaatgattaaaagtcgtgtgttagaattcactgaatcatcctgagggctaagttagcattggaaaggccataggaggagctatcacttcctaatttatttaggtgtaagcatatagatcatagttcagtcacagacatcacccatcttgatggaagacttatgaaagaagaacatgattagttttaactttttcaggattaataagtagaaaggataggagatgaattttgaaaaaaccattgcatcacatcatataatgatatagttaccatctctgctaaaatacaaaaattagccaggcgtggtggcaggcacctgtagtcacagctactatggaggctgaggcatgagaattgcttgaacccgagacaaaaattaaagactgttctttcaaaatattctgagaagaaaggaaagtagatatgtttaggaaatatttaatcttatattaattatttaatcttatcagtctgcaaagagatgcccctccctgtctttgttctttgtcttcatgtatgatgtgctagttatttaatattgtgtctcttttgtgcttcggatcctgaatgacctcagctgaagtttcttcccttcttccaggtttgtttgatacttaaatattaagtatttaaatattaaaaaataatatgggtaatatttaatcttaatcctaatgacctgaatggcaaagacactgtactcttggagcagatgtccagacattggcctgtgtgccatgccagtcctgtgcagattgtctgaacatcagcctggagagaaaatgaataaatacatttttaacaattatttatttatttgaggatcttaaagagttgttagctattattagggtctactactagctcctcccattttaaatcatttatatttgtcttctttctttttttttttttttttttggagacagggtcttgccctgtctcctaggctggagttcggtagcacaatcttggctcactgtaacctctgccttccaggttcaagcaattctcttgtttcagcctcaagtagctgggattacaggtgtgcaccaccaagcctggccaatttttgtattttaagtagagacaaggtttcgccatgttggcccaggtggtctcaaacacctaacctcaagtgatctgcctgccttggcctcccgaagtgctgggattacagacatgagccaccgggcctcccaaagtgctgggattacagacgtgaaccaccatgcctgaccctatttttgtctttttcagttgtgaattttgtagttggaggaggaattagaaaataatctcctatcattgttaatatgtaaccgtcatttgcaacaaatggaaatttaattctgtttttgtcagtgcggtgagatagcatcaagtatacccttcatttggatagattagtcaagaatttggccgggcgcggtggctcacgcctgtagtcccagcactttgggaggccgaggcgggcggatcacgaggtcaggagattgagaccatcctggctaaaacggtgaaaccccgtctctactaaaaatacaaaaaattagccgggcgtagtggcgggcgcctgtagtcccagctacttgggaggctgaggcaggagaatggcgtgaacccgggaggcggagcttgcagtgagccgagatcccgccactgcactccagcctgggcgacagagcgagactccgtctcaaaaaaaaaaaaaaaaaaaagaatttaatacttgtatgctcacagtggcaaattttcagcatagtcatttttgttaactttccaaaatgttgtcagaacgtgctgtcattcactctcattcaatctcctgaaagttaactcctgtctcattttctgtgagatgatccatgtttcctgttacacacacagtcagtacactcttagtgtactagtctccctgcacacctttcagaacaacattgctttcagtagtaaaaatggaaagagagaggccagtggagtaatgtgaggaaagaaggaaatgggtgggctgcgggggaaatgatcagttccccagaaatggtcggttctggagaaggaagaggatagttctaaaatttgggcataaaactaggacatcaaacaagcctggatgaagggaagaaacttcagctggggtcattcaggatctggagcacaaaagagacataatattaaataactagaacatcatacacaaaaacaaagaacagaaagagggaggggcatctctttgtcaaaggaggacaatgtgaagaccaggaacaagcaggaatggagaaaatgatctggtctttggatctgtgttgcagactgatgataggttctgtctcccccgccatttccattgtggaagaggtatgatgtagctggaagaaacttgataaagtatcctacaagtaaagcccttcgtgtgtgcctttgccactttccattatgtggagttttttcctggtgttagatagggctttttttctcttacttttctccaaactttgtcttttggctcttcgtgttaatcattttgccagcaggagttacaagatttggttttggtttccactttacaccagtttacacttaaaggcaaacatttaattcaagctttggagaaggtagagaaggtataggcataggtgctttatctcaatataaaagttgggggcagaatctcaggagatggctcctgagctgttcttagatgtatcactttattaattcttacaataaagccaaattgaattgatgtcggcatgtcatgttctaactggctttaataatttttttctttggctggtggatggagatggttttgagttataaaaaagtaaagaacgtgagtgaggaaatcctgggttagctcagagacagcaggaggatttctgagagagtggctgaggaaaaagcaatccatagacttgccaatggacactcattaaatgttaataggaactgcatgtgatgaaaggcaggcggctctggattcatcttgtaactgtatgtctacaactggaggtgtgtgaatgaaatcaaggaaaggcattaaagaaattatttgttaggaagcagaagcaagagtttgtttactttcatactaaagagaacactaccagcatttgtgaactgcatgcacatgagaagtgagcaggcttccagctcagtggcaggtgcaagatgatgttagaaacaaaataactcttatacttgaataaattcacaagaaggttgtgagtccctgacacagtaggtatgtaaaaccacgtagctgacatcaaggcctgttgcacttttgtaacctccttgaatcactggagcgagcagtccctggtgatgcagcgtgttgcagggctctgtgccttgatagggagttgcacctgtgatacccgaaacctccttacaaactccccccgccaccccccaccacgttgtcctggatcattggaatgcaggcgctggattgaaacgtttattcatagtagattaagagtctaagtatctgtgaggcctcacttaggaggctcttagaggattaataaaatatttacaaaataacctatgcaattgcttcattttaaagatatttgcctcttatcacagcataaatcctcattcaagtggcttctctgttctgtgaaggaagttctgtacttgttcttctggagaagcagaaacagattcctgccatactttaattaaaaacatggaagcgcctggtttctccacacgtgcacattcttgttcttacacacacagccccaacaaagagatcaacagagggatataaaatgatcatttttgaaaaagacttactgattcaagtgagcggcattcacatgtaaaatgttccgaaaatttattctgttatttatgataaagaatcttatccctgcatgttttacctataaccaagagagcctcaattgatcaaagtatagtttttctagtaattaaaaatgaatattgatgtaattaaaaatgttatccttaaaagtctattatggtacttactgtatactatcttgtctgccgtcttggtagatcaagttgtacagtcatatttctagatgtaggatcaagatttcagttaatccttgggtttatgctaaggccacaagtatgtattatctgtatgaacaaccatttatggagtgcctgccatatgcctagaattccgtgaggcctttcacgagtactgctgtgtcatttaattcaatcctgataataacgctaaaaatcagggatttctcatcttgttttacacctgggtaactgaggctcagggtagtcaacgcagatcatagtaagtaaaagactcggtgttgaagcaccgctctgtgactccatgcctcatataatagaggattgcattgtattttgttttggtttgggttttttgatagaatctcaccctgtcacacaggctagagtgcagcggcatgatctcggttcactgccacctttgcctcccgagtacaagtgattcttgtgtctccaccccctgagtaactgggattacaggcttgcaccatcacacctggctaatttttgtatttttagtagagacggggtttcaccatgttggccaggctggtctcgaactgctggcctcaagcaatccacccgccttggcctcccaaagtgttaggattacaggcatgagccactgtgcccggccttattttgttttgactttttttttttttctgttccgttttacctccacttatttccaagaagggagaatttcagggttgttagaaccagagcttaatccttttttcctgatggccagtgctttgtaataacagtgatcttttactgaatttcccttcaatgatgtactattgctcttgttgtcttgctgccttttaaattatgacttctctatattataacttaaagttggtactttgataattgttatcaactttaataaaatatgtattagatgacttaaaatttaccagaaatctgtattaaaatagtctttagggcaaacaaaaaattacctgacaacagtctactcacttgcacgtgcgctttccctctctaggtaataagatggaaatatttttacctctttcattttctttctcaaagccgtttcagaaagggataatgtagctggcagctgtggccataggaagtctgtgcaatctgtggtttatatacatgaaaaatatatgccaaaatatatgcatttactatggttttttttctttttatttgttgataaggtgcataagccccaactttccactagactaacttgtgattaattgggacatctttgttctctccaatgtgggatctaaaaaccagcctccgtcttcactgtatggcagtgcagctgctgtttgcatgctgttttctttgttgctatgtgtgtgggtgcctcaggcccaagtcctgagtccccattctcctgccgtgtattgcttgtgtttctgtggagaattgtaatgttcttggatcagggacttttacaaataggtgtgttcttcctagttggcttggagtgatcaaagaccaccatgtttcattttgcccagagccttcgaatcccacccaccaccctcagtaaaatcctttgcagagagctttaccctaaagacacagaaaacaaatgcaacacctgtgaccctaagagcattacttacaaaggcctggaaactccctgaatgctgtttataaagtacaccctcagttgtgtttcttgtttcctttctagctacatgtgagcatgaaactcttttgtagaggtgcaggaaggtcatgctataggagaacgtgattgcacgtgttagaatgcatgctaggacacaggccgattcatgacactgaattctgactcatcctaagggagaggaaatgcatgtatatggatgtgttttggcttctatttaactctataattgtttcttttttcccttaaataaggatttcttcttgattaatggtgttattcacaagagactgtagggtttctgtacttgcttcacccttgtgaaggggaaggaatgtgttttcttttgccatgtccctcctcaacaggggtgctcttattaaaaccaggaaactaaacagaaggacggtgcatgtatttgctcattgttctctcctcgtgctggacttgagctgaaatgtggtttcagggcttcatgtgtgcactgagtgatggagtaattaagtgaggtaaatgcatatgaagtgcttgttcccttggtgcccggcacatagtgagtgcttagtaaacagtagttgttacttttcattggagccaaatgtatatcacacctccctttctgtaatacatatttatgatagcccattagttaagtctgaaggtcagtgtgttcttgccatagggctgtaggaaatgttttttgtacacttctacatgtagttggcggattgttttttaaaaatgctacctacattgttttcctctccctaaattatctcatgactctagcagattgctataaataagtagggtatatcatatttgtaggccaagaattgacaacccagtttcagacaacaatgaagattttctaccctatttgaatacaaaatcaaaaccaagatatttgttaatatcccaatattgatttttgttattagaagtaaattttagaagtaaatgttgaaaaggaccacaaaagctgcttttccagcctctaatggaccagcagcctcttttgggaaatgattagttgcatcttccaataaataacttttgatatattaaatactcatttgatggctgctctctaaaggaaatgaagctagcatggtcccttggcttccatgagccttaatctcatgtatctgttattgcacagtttataatggtaggggttttcccccttaggactgactatgttttcagtaatgttatttttttttaactcaacctaactggacaccgtagagggcactaataaatcacacctctctgtgctcaaataaagacagacattctacctctttctcccacctacccacccattcctggatcgagcaacagaactgagcttaaggccacctagagccaccatcacagaatctctctttatgttggatggcagtggggatgcagatctgaaacactagtgcatctgaaacaacaatgggaaggtgtggaaaaaagggttagcaggcctgagactgccctctttagggaggcctgcttgccaggttggcccttggctggcatccaggaacttggattttgggagtattcccaccatttcctcacctgatgaaagagtggctcattgcttctacactgtaaataatatgctttatgccgaacacgcgctttccttctgggaatctggaattttggtccatgctaggcaaagcatgcctacgtgaccactcccacaaaaactgtgggcactgagttgcaaatgagcttcccttgtagacagcacctcacacctgttgtcacaatttaatgctggagaaattacatgcatcctatgtgactcctctgggagcaccactggaagcgtgcacttggtttcccctggagtttgctccatgcatgttgccctgtgctgatgctgctttgtatcccatcactgtagtgagtcttaggtgtgcgtatgaccacgtgctgagtcctgtgagtctcgcaatcctgggactgatcttagggacctggacccccaacacaggtccctaagtaagttagtccccccaaaactaacttacataagattccatatgaggagaaaagtcagaaattcagaaggtgtgcctgaaaattttttctattgacaccccttgttccatatgatcttcttcctaaggactacttcattttgtcattgagtttagtcagtgaatatttttggaatataatgtaatcaggtaggcacttcttgcatatttacatattactgcaaattcatttattgttctccactaccattagaactgagggataaaggagagagacataacacaatgttcgttctctttgtctctctctctccccaccacatatactcacacattttccctgctttctactattgaataattagaaaccagtactaactagaattcttcttactgataaagtgacagttgaccctcatatggaaattctttatgagttaacaaattaaaataaaaattacctgaaattagagttaaattttttgatgttttttacaatattccaccactgtcccacttcttggatatttatctagaatatgtctttccctaccctaccgacagataatttgctagagtttttcatgtctatctccattttcaaggactctttagttgcttccttatcaggacaagaaagaagcagaagtgctgctaggaaatatctgccagagcatttggggagaaagtacaggacagagactggatgcaggagtggctgctggccaccagtgactttacctgctgctcttggcctggtaggactctgattttttttttttttttttttgagacggagtcttgctctgtctcccaggctggaatgcagtggtgtgatctcggctcactgcaagctccatcccctgggttcatgccattctcctgcctcagcctcccaggactctgattttgtctgcaagtgttcacctcacataaactttgcctttttgatctagtggggtaaccttcatgccttactccaaagaaaattgaacatagagcaaatagaacatgtgaatttataggcaatgtctatttgagactccataaaaacagatgctgaaagaaagattaggtgacaaaaatgttgcctcctgacttggtaggtaattacaagtaaaaaatgaaatgttttccaccttcttttcattagtgaaattttgaccttaatttcatgttaaactggcattaagtccttgataggtagttgtcatgtaatagtaccttttcttcctctaatagatatgatgagtaagaacaaagtcctcctggtgatttagaaaatcagctacctgttgatcctaagcagtggcttgagctctttcattgcactgtagttcacagagagaagcaattcactaattataaaagttggaataaggcaagcttttttattccatggaaccattatagctacagatttggaaataacaaatgctactaggtatgaaaagtaaaataagtgaaagccttttatattttataccttagactgcctgaagttccttgtatgatttttttttttttggagatggagttttgctcttgtctcccaggctggagtgcaatggtgcaatctcggctcactacaacctccatctcctgggttcaagcgattctcctgcctcagcctcctgagtagctgggattacaggcatgtgccaccatgccccactaattttttgtattattagtagagacagggtttcaccatgttggccaggctggtcttaaactcctgacctcaggtgatccacctgccttggcctcccaaagtgctgagattacaggtgtgaaccatcacgcccggccaatatttcttttaaaatacatttcatatccattcattaacattgttttatttctgtgctttcccctactccccccactctgtgtattttctttttggtataggagcagagctccatattaagaattaaatggatatattcaaaattaattagtctctcctttcatgtatctatgtgtttattttctcttggccattttagtcttaccaagtcttctgtaaaagatgctctctaccacttctccctctgccccacctgcagatgctgatatatctcaaactctggccaggactcaactacatattgttttggttaaagtattttaaatgtgctaatattcagtttcaccattgggcagttcagtttttgcccacaattggaaattgcctctagtctatcagcttttaaatgtatattcatttctcacatttgcacctggggctccgtttctcatacttagtctctagtccctgcatttctttttctttccaacttgtttttctgagatagccactctttttctctcttgccatttatttttacatttgaggaaatttaagtttttgcccttaaaactataaacaattctgtaacaaatgaactaagaatcataggctcaaccaaggtcttaaaatattttcagaaagatgaatatttacttgtattagaaaatattaatattcttatttctgagtatattatgtaaaacttctggatatctacatttgcaaatgtgactgcctaatcagacattgaaaaacaggttttaggctcacactggctgtttttgtttgttttattttttagtaaggatgtcgctaaagaaggtagttgagtttacagaagtaacaagtggttagttttcaacagaaacaaattaggtataagaacagcataattcataaaaattgtgttgtgtggctcacgcctgtaatcccagcactttgggagactgaggcaggaggattacttgaactcaggagttcaagaccagcctaggcaacataatgagatcccatctctgtacaactaaaataaaaaattagctgggtgtggtggcacatgcctgtagtcctagctacttgagaggctgagccaagagtatcgcttgagccaaggagtcaggctgaagtgagctatgatcacaccactgcactccagcctgggcaacagagtgagaccctctctctaaaattaaaaaataataattgtattataaatgtgatggttttagtaccatccaagctctgctctaggggtagaaagatgtgtattttacagactctgtactcagctggttatactgtaagggattatctgagattacatgtggcacatagatataaaatagaatgtgattaaaaaaacacaaaaaaaagcagaatgggacttctgaacagatcacagaattcaagagagagagataacatttgataggtgggccacaaatgattccccagcagactgatgacagaattctaagtagaagaggtagcataagcaaaacgttggtggtgggagtatatagtgtgttcactgaaagctaagttctctagttctggtgcagtgtcagagtgtgtatgtgagaactaagacataaaaggtagattggggcagttcttgaatggcagcattaaagaatttatgcttaaatcatttagcaaatgggaccgttgaggttttgtttgttttgttttgtttaagatggagtctactctgtcactcgggaaagtggcatgatctcagctcactgcaacctctgcctctggggttcaagcagttctcctgcctcagctgaatatggaagtagctggaacttacaggcatgagacactgggcccggctgaggtttattttaaagggaggagttgtaatgtggtcagaggtgcactttagaaaaagcaccttgacaccagaatgtcgtcagaatgtgagtggggtgaaaggagtgaatggaaacaatgagcacctatcaaaataatccagttaggatgtaatgtgagccattactaagcttgggagaataggtataaagagataggtatatgaaactctcttaactcttcaggcctggatttcagaagaatagtgggaaataaagtaggagaggacattgatggggtttggatgggtgtgagcaggcaggagtgccttctgtgaagagcatctcagtggagggctcaactcaaactgcttctttgaatcatggcttcgaaaattactcacttcatgatattagacaactttgacgcacctcagttttcccatctcttaagtgggtttgataatagtatctcaagcctgatttgggtatagatgaacagaatacatatctattacctagcatcctacttggctcattttcaggcctcagcaaagtgtaggtactagtatttttctttcattttctttgctctaccagatagttacttttaatcccatttcatatgtgaggagaccaaggcacagactgcattgtttaaatccgtccagtagcctctgtgcctttatgtgttctaggtttgggtttagttttgttttgttttcagaattcagatagaagttctttttgagcaactgattacattgatctgtaggccagatccctaaagacatccttagagttgaagttttccttataaaatagattgaacagatgcagaacagaaattagaaattgcaggaaggaggggaagaccagaagagaattcaggaattaatcaatgtaaaaagttatttgcagaagataagatgaaggaagaaagtatgcgcccacgaacatttataattgtaatggttctgccaggcgtggtggctcacacctgtgatcccagcattttgggaggccgaggcgggtggatcacctgaggtcagaagttcaagaccagcctggtcaacatggtgaaaccccgtctctactgaatatacaaaaattagccgggcatggcagcaggcgtctataatcccagctacttgggagaattgcattaacctgggaggcggaggttgcagtgagccaatatcgtgccactgcattccagcctgggcgacagagaaagactgtctaaaaaataataataataataattgtaatggttcattatttatgtgtctaatattaaactggctcatttaattcatttattcactccataagcctttacagaactgccaactatatgagagacagtgttgcagtttgctgattttttgtacactgggatttacctttgatcaagaaaatgtaccacataaaggtaatctcattcccaaaagcattttctaagaataggtaacttactggtacttgcaggggaaaaaacaatgaagattaaattttaaaatgtatgcattttgcaaaaactgtcattcttaacttgttcttcacccctagcgtactagtaatgatgctgcctccctgcaccattggtcctggggaactagtttacatttttaggaaaagcactcgaccaggtcaggtcagctagattcttgtcccaagtcagctacttacactttagcctcctgatcttgagcaagatacttacttgttaatttccttctatgtaaagacaaaacatggcactagatgatttctaagctgcctcccaagtcctacattcatagcatttataaactctgtgagcattgagtcttcttggcagtggggatatcaaggacgataaacctgaaataaagagacctacttgacagagaaatataagcagatccctgaaatataagcagatcactgaaggggcaggtcatttttaatgggagtgggaaggtggaaggaaaaagataggagaggaaacatttcatggagaggttaatttcagttgggctttgaagtatgaaaatgggcataccagaaaggcagaggggtgcagaggtaggtgagattttgtagtgttcaggatcatttatggcaagtaggtctttgtagctggagcttcagaggtcttggcaggagatgatgttagaaatgtaggttgagtctatattgaggggacttcagatgccaggtaagaggatttattatttattctgtgtacaatagggagccatgaaaggtttgctaagaaggggagtgaaatattcccaacctcatgtttttgaaatttgatgaaagtgtgtagaaagtggattaaagtgagtagggaaatcctgctatttttttaatggctatcttcatctgttaacttatacccaggtaccttttggcatttatattgatccttccaggattgcccccatttctgtaaccagcaccgatttcaccaactcagtaaaatcctgttggtgcttaccttctttgaggtggcaccatgagtttatctctcttaattgtctcccctaaacacacattattttccccaggctgcaaagtagatatatcattagcaaaaggtaaaaaggcaacgaaatccagccttaaaagataaagttaatgatttagaaattcactttactcagctgtacatccatagatagcctagatagttaaataaatcaggaaagattttaaccccttagtggttgtcacagtgatgtctgtcttaactggcatctcagtccccttaactgcaaagactaaaagaaaagagtatggcacttccatttttccctgcagcacctgctcagttgaagttgcattgctttcatgcaggacagacactgagattactctctggggatcagaacccgaggggttgtgcttagactccctgggcaaggcctgtcaactctggctttcatgtttccctttccttttgctgcagctgtttcttccagcctgttcagcaagtgcaccaagagttactgtatggtgtacatgcatgtttctaccaaacagctttatcatcggtgttagaagcctctctgtacaaacctgtggctgtcataaggcgatttgatttaagctttctgcatgcccaattaattgagagttgaaagctatccttcagattggtgtggccctgttacttatgcttgccagttatcagccaccttggtgtcatatagtggaagcattttgaatattttacatctgaaaatgttttaagataataaatggcagtcatctcagaatgccagatgtttcttcctgttctcacacaaacatttatttacctgataatctgcagaatcatagatttcagattaaaaacaaattcttctaaattatctgcagttgatgcagtctgtcttttttaaattattatttaaagatgctcattttgtcctaattttccctgtaaattttatcagagcagatgtggtcactgtgatgcagcagtggcctaaactaatttcactgatgtaaacattgttaaacaatttcaaatgcaactttggaaacattgtttctgaacctgtttaataatgtttaaaaatgcatcaatgaaattggcttagcctgtggcctttattacattatctgttctcaattacaaagattctgtgttttatgtctggactagttataagtcactgaaaaaaaatgatgccagctgaagagtgtggcttatacctaacccgtttaatttgatttaaaattgatgaaccttggaaaatacttccagaatgccatatcagctatcaaaataataggaaatgtattcaggtcatcatattggcattacaattttagttaccctccccccccgccccacctttaacttttattcccattgcttttcacctcccattcacccccatttccattgttgtgattccactactaaattccaagctatcagctctgaaatgcaacatagaacattaaatatgtttttactaattgtgatccgctaaaatttaagctctgtgccaaagcctttttatttttatttcagaagtagtatttaagtgatgacatgcagtaatttgttcattcttctgtcagtataatttacaaggcaatggcagataaacatagcaatacaagattcatttacggtgacacaatggcagatacacagagcagaaccctgcctatgagataaagtggactgagtgacttatgcagtaattaggggataattgtcattaacctcacaaacagtagtttacccatattgtttaaaaggctccaggatgcataatgacaaggtaatctgtcaaagcgctagggggaaatattaataagatttgtgcaagcctggatagaaaatatgcagaaagcggccacattaagctaattggtggatgaatatacacttgtaaaagtgcttctaatggcacgtttgcagctctccaaatgactaccgttaatgtggagaagtgggctgcttagaaagtcaggactgctgggacaagagggtattaaggcacgcagacgccgttattaccttgtgctctataatgtacgctttctccttttatcctttttcattttgaatttctgaggttttgttatagtaacatatattgattgtttactctgattattctgtatttgatctatatttcttcagtcagccaccaaaccccaaacacctctcttttgtggcccaataaaatatataatctctacgttgatagtggcttattaatatacagaaacacaaactattaatgcatatgtggatttataattatacacacatgtgtatgtgtgggtgccttttataggaacacatttaatctgagcaatcaaaggaaagtagatccattaacagccttgtgtatgtgttacaagtaataatgtgttgttccctgatgaatgctaaagcaggaaattaatctttgtgttctacggctattcttatacccagaaaagaacaaagttaaatctcctaatacatctttctgttcagtcacacactcagtcctcagtgtgttttatggaatactcaatcctcactgttttatggaatactgcttactaagtattccatccctttctcgccctgctccctcacatcctaatgaatatgttaaagttccttggggttgttcaatcagcttcatttgtaaagtaattcaaagtataatatgtgaaggagaatcatccattcaagctttggaagttctataccaatatcagtaatcttgattgtgcagatggaaccttatggaacctcaaagataagaggttgtagccttgaattgttcaagttttggcccttacttgatgtgtaaaatcaccatcatcatgtaaaaaaattttttgcgcctatttttgctgtttttcagacattgtggaaaagcatatctggaaatcccagggactctggcatttatgtttagaaatgtaaagcctcaactatctacaaatttagtagtggaactttggtttatgcaaggagaggtaagctagaaaatgtagacctcaaagcaaaaatgtcagagagggctctggtgagttctgtttattgtaaagcaagcagatttatagctgtcctaagaccagggatttatctttatgtctgagtggacaagaaaacaaggccgctgcagggactgtccctttctttcctcctgtttctagtgttttccttaaggatcataaacggttcctttgctgttctaaactataaaataagtaccctctagaatctccactagttatcatctccatatgaagaactattaaagggtttaattgaggtgagggtcttctgtacaaatactgctagtttttggagctgcaaagatttccgaaagactaccgatatttgtttacatagtttttttgatatataacatttattttgtaccttcaagttgcagaatgttcacaaaccctactggtatgatttgggggtttccaaggcctcttagggagtctttgggcagtttccttagtttacaagcagaatttttacttgaactgattgatgattgaattgaccaggagtcaaaattaatccaaaagaattagtgactgtaatcacatcactgacaagcagcaccagacagaaacatcaggggaaacatccagaatatacgataatacaggaactttcagataaaggcatactttcagtcataaatacacatattctaaaaatacgttggttacacaagttggttaaaagtaaaagggttttaacattttaattaaagtgattcatatgttcagattctaggcataaatagtagaataatagaattgtaaagctgagtttttagtaaggcttacaaattttagtatgactcctctttacatgtgaacattaattttattttcctctgaggttgaatttgtgtatgttatatttagcctaatcaagatacaaaatctgctttagcctaaaggtatagggctagatattctgtgcttaagttaaggactcataggtaatttgattttaaagattggtatactaggaatatcaactggatttagtattttctattttgaaacttaaatgattcctaagatattcttattaaatattaaaatgtgtctttaaaagtttctcaggtttgatttacaatgcagcgaggtaacttgaaaaatactttggaatctttgaagtccaattccagacattgcagaaagtaatttactcctttgaatttttttaatatggcaaagcaaggcacctgctttatttatttgcaaacaaatgcccatagaggaaatgcatatggctggttttaagctagacaagctaaaattcctcagtacaaggaagaaatcctgacaggcctgtaatagagcttagctggagcttctatgattaaatatgttgtaccccagagtgatctatcataatcactgtttttaaaataaaaacgctgtatagactgttactgaagaaaaaaggcatagtactctatgaattatacattcttatctggtccgtaatcaagaacattctgtaacagtaaattttttaaatcaaatgtcaagcaatattttaaaaatcagaagaaccacatgaaactagtgccctggcattttgataatgttattttggttagagaggtgatcatttttggagagtatattgttcaacttgtgaatacattacttcttttaaaaatatatcctttccattgtgaaatttttttcaaatatggatcagaaaaaaattataaatatttgtatactgggaaatatatcaaagccactacttcaaagtcacataaaattatcatgttgcttcttccttctaaaaactagagtcaagggccatgctcctcaaacttccactttaatccaaggagaggcattcttttgactatgtactttttttttgctagtagtttgatatacctcacctcattatatcaccattcgctaagttgaagcactttgaatgctataataagagtgatttataatgagagtagtatataataagagtgagccaaggtcagtagtttctgtattcctgtgtgtgtttgtgtacatgcacatgtgtgtaatgagtaactcctttaaagtatcaatctttatatgcagtcagtgtttacagaaagaagatttaatgttaatgttagcatgtcagctaacaaagactaataagttatttatcttgatgggaacttctttaatacaaagttttctgagagccccaacattctaactaatggtggatattcctgtagcattcatttccccttgggcagaggaagaataggaaagatatttcaaattaagtcctttattatctggatgaactgaatgtagcattagctgtgtaatcacagcaagctggtatacacctatctctaatgtttgcatacttacttcatgacaaaggcagtttggggtggatgaggaaagcatatttgttcacataggtcaatgttaacaagtaaagtccagtctgaatttttatttcgaaatcattctttctgcccatgccacaccctgaagactctcactcatggggcatccctgtcctagagaggagagtagggatgtgattggtcagcattgtattttgaaggtaaagggatgctgttgagaaattctgcaaaatacaaatttccaaatcatgaaaattgagtagggctttcgttacccaaaacaaatgttgatttaaaaaaaaaaaagttctaatttgaaccatttggtacatacaaccgtgatatgaatgagtatgtttcattctgcctacaaatattacagttgttccagctggcctcctagaaacattagcccgaagttctggaaaagcacagtcacataaaagagctttgtgtgaatagagaatggtgtaattttgtttacttacacaagcaaagtgctctgatgtatattgtgtatgctagcggtgcatcttcctccgtcagtgcccagcaagaaatatgtgtttaatgtaaatctgctaaaacaaataaacatgccaagttctttttccacgattttaagtgtttctcagaaattatcaaaacattgcttgaaaaatttccctaaatgcttcccagaatctattgttttcaatgagaattttttttgtgtggccatttttattcttctccccatcttgcctgctcatacttacacacttgcaggcacatagacacacaacattgatccatgcacactttggaaagccaagtcttataaattagagagataaacataatctaacaaaaaagggaaaaaatgactctgaaatagtagggagcagtcagatcagttaaactttttgactgagggtttaaatactggctttagaatgacaatttaaggttgaaatatctgcttattacatatggacccatctcagttacaaaacaggtaaatagcgggagaatgagagagaagaggactgcacatattatgtataagtgttttcttcagaactgtttgtaatgctcaaaggtttctcttccacagaatatctccctgaaactcctgctttcagcactcagagccacctctttccaacccacatgtgggatctaggagttttccatttgctgacccctagctagaagtttgttgaatgcccctgttcatattacctgagataatggtctgagcctatcactcactcctgaggtgatccagaagttagatggtatatctcctaatttctgggtcacattctgatacatgtccacctaaccaagaggtcagcacaccggcaggtgtaggcaagcaaaggcggattatcagtgtcttgcagagtgtctgcgaaggtgtgtgtgcatagcacatacctgctatatattggtgttagctctgtagggaggtagtctccatagttttatgattacacaccccattagtaaaaatttgtgagcatgtacccccatttatatatatgtaaagctgtttctaaactctgtgtgtgtgtgtgtatgaatgatactagcaaaaaatcacctttaggtaaaaataaataggagttttcatgttgactcaccatgtcacagtggattgtcttgcatattccactaataggagcaaatgggagcatgtgtgcctgtgatttggccgtgctgtaatacaggaggaaaggagtaaggtggcttataaacagtggaaagctgtacatgttgagttatgtgtgtgagagttcaagcaatttgcgtgatttaattttttgaattaacttcattgaagtatactttccatacaataaaatccgccaattttaagtgtacaatctatgtggccataaaaacctcagcacaatcatggtgtacaacattctcaccaccccaaaagttccctagtgttgctttacactcagtccctttcccctggcaactactaatccactttatgttcccataatcttaccttttccagaatttcatatgcttggaacagtagcgtatgtatgtctttgggtctaacgtctttcattcttagcataatgcttttgaagagtcgtccatgttgtagtcggtagcttagttctttttattgtgcagtactattccattgtatagatatctcacaatttctttacccctaagacttgaacatctagaaaacctggtaaaatttatgatttaagttttgcatagcattgtttcatcaatttttaattcagcaattactgtttcattttacctaatggaatacttaagctaggtaggcttgaaatttggtaatttctctactttctatccaatctgtttctcttgctttgatatttgaattaacccagaaggaaaaagaatagaaaagtacaataggaaactgattatgaaaataaattgccaatgtggttatgatgaaataatttcttaagatagcacactgtgccaatctagacatgaaaaaataaacatatctcacaaacctctgattttgttttaggtagtcagcagtccctacaggtcagtgtcatttaattaaaagctctacagttatatcaagggggaaatacttttagtttttagctaatcattttagtattttccattaaattataccttaaacttgactgaaaataagttcatatgattgagtcttttaaactgtttgcttcttgttttgcttttttttttttttttttttgacagagtctcactctgcaaccttcacttcctgggttcaagtgattctcatgcctcagcctcccgagtagctggggttagaggtgccctctgccacacctggctaatttttttgtatttttagtagagacgggttttcatggtgttggccaggctggtcttgaattcctgaccccaggtgatccgcctgcctctgcctcccaaactgctgggattacaggcatgagtcaccgtgcccggctgcttatttcttaacaatttgactactggagcacataggccttagatccgtgctgcgtccagtgtttcttcctcacttccattcttggacagaaagaaagcagttgttttcctgtatgctgtgatgtgagttgtagcctgccatgaacacaggtgggctccttgttggactgagcttgaggtccctcgacagtctgattatcccaaagccccttatttggtttctcttccatctcttcacatctgttccttccctactatccctctttcccaataagggaaaccaatcaaccttattttactttgattttaaaactataaatcattgaagtgctttgatgtgggaaaggactcagataaaaccatttaaaccatgcatttgatcctacaacaaaaagttttaaaaagtcacttggcagagccatacaggaacagggtgccagatttctacaagtgataatcaccagttccaatgaagtaacaaaaggaagtctttttatttcaaatgtgtaggtgtaaatattttaagtcttttatactttttctgaacccagtaaaactggtttataagtctatattatttggtgttactcatcttttaattaacagtatagccagttattttcacaggaaatcaacacttatgataataactcgcatttaacttaacagggtaaatcttattatcctcattttgtcaataacatttttcaacctgaagggttaaaagtcactgtactctggttacaaatgggaaaacctaaaagaattgacttaccagctacaaaattgcagggagggccaagagttcagttatgtactctgatgttaacatattattcatgcataagaccagtggcccagcatgagttggtcggtagttgggatcttcgtcctagcctaacagactgaatttttgttttattagtgtttattccacgataatacctaattctttttatagctccaatttacttttgtaaagtttatttgacaatttatactgtttgcaaggaggactagtttttccaatacttaagttaaatacaataaaaataaattgactaaaaaaatgtatcatgcctttagttgttgcagcagtgtccacttgtcccaaattttccaaatggttacttttgttccagatgagttaaaaaaagaaaagagccatccaactgacattggtccatttttgaatagcaatatagaccatgcatagaggtcgttaccttcacagaagactcttaaactagtgattcagaatcaaagcaccaaaccatacttatttctatcacaaagatcttcagaaaaaaacttggcatttcttttttccctttgatgctttctaactcccttcaacgaggttagtcaaagatacagtaaaactgctagccattcttagcatccagcttgcacacttgttaggttgtgtaagatcaatttgtttcttgttgcagtctctccatttataaatgtggtgaattagataatcttgatcaaattgataatgattttttggtttttgagacagtcttgctctgttgctcaggctggagtgcagtggcactatcatggctcactgcagcttcaacctcctggattcaagcagtccttccacctcaaactcccaagtagctaggactataggcacggaccaccacacttggctagttttttaatttttgtagacagggtcttgccatgttgcctagggcttaagccatcttccaccttggccttcctaaatgtcgggattataggcatgagccacaacgcgcagccaatgatgacttctttggaaaggacacctatggcactatcaaggggactctagtttggtgttatagagctatgtgtcccgttcttaagtctatttgtttgcaaatatgctttgttgtttatctgtgtaaatataaattgctgcttctattaccactataaataaagcttctcttttatgattcaggaactagcaaagttctaaatcatacttacctggatctctttcaccagaagcaagtggtttaatgtaacagactccattttagcagagacagcaactaagcgctagaagacaatctgaaaagcagtggttttagaaatagtagtgggcattgtggtgggccaggagaaaccatatgggactgctctgtactgtagggagaaagaagataaagggtgatggaaatgagatgcctcaggtgggactgatcagttcctatggtttctgaggtgcattttaatgccagaggctgccagttgtataagtatatcactgacatgtagatttaggtacaggctaccttggaagaacctggggaagatatgactgtacattgctcagattgaggctcagcctgagaaattaatccgtagtgaaaggctctgtaaaagaacactcaagagagtagatttgatggtacaagaaagatggtatagaagaggacattatagcactctagagaaagacttcctcagaagtcctgctctttactaccacagactcaatgggcttacctggggaatggcatcatggaatgacagccactgagtactgtggacacactctaaacttagagtcagaatttttgtgttcaactcctgggccttcaattagtatcttgacagccttaacaacctatcttagctttcttctcccctgatttctcatctgttctctgagctctggaagttacgataggggtgaaatgagataatgtatttaaagtcacaacttatttctctatttacctatagcaccaacattcttccatgttacccctgttccaaaagcagaatgtgaatgataccaactgctgtgagtgaggttttgaaaatggcgatggccggacttcaggatcatctggggttgccatgtgcctgcacccttatgtgactcttctgagcagatagttgtataagagtatttgatctgaaggccaattctatctacatgatgaaggagggacatctgtgtttgacagttttcataggaatggacacccacatgcacgtactcacacatattctttatgtaaaatggtaggatgctaggagtgagccttacaaaggggggcacataactatcagagcttttttaaaaaagtaattcaagtaaatgccaaatacccacttaatcaaactagctgtgatgattcagaccatagggcagtgtttcagagagaattttacatccacaggttgaggagagacttttcccttgcaaaagcagtacagatcccttatgcctctcatcatgcttcccctagtgtaacatcctacataaagcacagtggctgaaaccggaaaattcagatgggtatactactactagctaatctagagactttattcaaatgttgctaattttcccactaatgtcttttttctggtctaggatcacacaattattttttattagtcccctctaatctggaaccattcttcattttttataaatctttcctgaactttacactttgaagagtactatctactgttttgtagaatgcccctcaattttggtttgcctgatgatttctgatgattgagttgaggttgtaaaatttttacaatgtgtttgtccattcccatgtactaataaagacatacccaagactgggtaatttataaaggaaagagttttaatggactcataattccacatggccggggaggccccacaatcatggcagaaggcaaaggaggagcaaagtcacatcttacatggaagcaggcaagagcatgcgcaggggaattcccctttataaaccatcagatctcatgagacttactcactgtcataggaacagtacgggaaagactcacccccatgattcaactaacttccaccggctccctcccatgacatttggggattatgggagctacaattcaagatgagatttgggtggggacacagccaaaccatatcattagaagaatgccacaaaagtgatgtcgtgcccttcttagtgtgtcctaacaagcggaacatgatggcgtgatttctactcacggtggtaacgtcgatcacccttttaaggtagggtctgttaggttttttgcgataatgttatgattttccctttgtaattaataagtatcttgtcattttgtttttaagaagattctttgctttcttaaattcatggtcagggttagggcaagtgtcactcacagagggatacaaagtgtgctgtcccaatgggaagaaatggtgccctagaaagtgatggagtcattatttaagtgtttgaatagatctctctcaatccatgctgaaatggatcgcctgacattacattgcaggattttaaagtcctacctccaggcaaatctcatagttactggcaaaaatgaaagtgtgaaatgctttttaatgtatatttaacaacacatagtctggtgattactgatgtgtattctctgtggactccctttgctatcagaggaggatgctgagagacaactttttacacatttattctgtctaaatccatcacatgtttactttttaaatatctatgactgtcatttataacaagatcataaaaagtcaaatacattaagtctaactcaaactttgaatcataggattacaaccaattttcaggaaaagtacaattaccttttatgagtgatgtttttcttactcttccttatgaaattgcctgctattaaatgatactaaaatatagccactcaaaaaaaaaagatacagtttagtaacaaggtatgaggggtagtgctactttattcatctttttgattcagaaattcacataactcctatttaaaggaattttcatcattgaatccagtgtcatgtctgcttatgttgaagaagtaaatttcacaagaagtacttaattccttcctatagtatcactatttaataaggactaaggtaccatttttttcatttatattggatttcacagcaagagttcacatcttatactaatatatgctaaatagttgcatagtatatagatcattgttgttaaaaaagcagtactgaaggcattttagatcacagagccccagtggtctacattttgtttgctttgacattattaaactcaatctgtttctctaactgtgactctaattactacatttgcatggcagaaaagtttgctttgtgggttgacttttattaacagtgcttgcatgttgttttctgctcttgctcagtgttttatgagcacacagagcaccttcagttgcattgaataattatgcacaatcaataagtttttgtgtttgtctttgttgtttctttgatgtggcctctaggatgctgctggcaaggtgctggaccgctgggccatcatgtctcgagaagaggaaatcatcacccttcagcagtttctgcggtttggagaaaccaaatccattgtggagctgatggcaattcaggagaaagaagggcaggccgtggctgtaccatcttcaaagacagactcagatataaggactttcattgagagcaataatcgcaccaggagtcccagcctccttgctcacttagagaacagcaatccttccagcattcatcacttcgaaaacatcccaaacagccttgcatttctgcttccattccagtacataaaccctgtctcagcaccactgctagggttgcctccaaatgggctactgttagagcaaccagggttgaggctgcgggaacccagcctttcaactcagaatgaatataatgagagcagcgaatccgaagtttctcccacaccttataagaatgatcaaacacccaatagaaatgccctgaccagcattactaatgtggagcccaaaaccgagccagcctgtgtctctcccattcagaattctgccccagtcagtgatctaaccaaaactgaacacccaaaaagctcattccggattcatcggatgagaaggatggggtcagcctctaggaaaggaagagtgttctgtaatgcatgtgggaagacattctatgacaaaggtactctcaaaattcattacaatgctgttcacctgaagatcaaacatcgatgcaccattgaaggttgcaacatggtctttagctccctccgaagtcgtaatcgccacagtgcaaaccccaatcctcgccttcacatgcctatgctaaggaataaccgagataaagatttaattcgggccacctcaggagctgccacccctgtcatagcaagtacaaaatcaaatctggcactcacaagccctggccgacccccaatgggttttaccactccccctctagaccctgtcttgcaaaatcctctccctagccagctagtattttctgggctaaagactgtacaaccagttcctccattttatagaagtttactcactccaggggaaatggtgagtcctccaacctccctcccaaccagtcccatcattccaaccagtggtaccatagagcagcaccccccgccaccctctgagccagtagtgccagcagtgatgatggccacccatgagcccagtgctgacctggcacccaagaaaaagcccaggaagtcaagcatgcctgtgaagattgagaaggaaattattgataccgccgatgagtttgatgatgaagatgatgaccccaatgatggtggagctgtggtcaatgacatgagccatgacaatcattgtcactcccaagaggagatgagcccaggcatgtctgtgaaggacttttctaagcataacaggacccggtgcatttcaaggactgaaataaggagggccgacagcatgacttctgaagaccaagaacctgagcgggactatgagaacgagtctgagtcttcggagcccaaactgggcgaggaatccatggaaggggatgagcacattcacagcgaagtgagtgaaaaagtcctgatgaatagtgagaggcctgatgagaaccacagtgagccctctcaccaggacgtcatcaaggtgaaggaagaatttacagaccccacttacgacatgttttacatgagccagtatggactgtacaatggtgggggtgccagcatggccgccttgcatgagagctttacatcgtctctgaattatggcagccctcaaaagttctccccagaaggtgacctatgttctagcccagaccccaaaatctgttatgtgtgcaagaagagtttcaaaagctcctacagtgtgaaacttcactacaggaacgttcacttgaaagagatgcacgtctgcacagtggctggttgcaatgctgcattcccctctcgccgaagccgagacaggtcagtaaatctccattggctgctcctgctgggggtggagggtgccagttttcagtcatgttggacttcacactaaaagaaatccaacttagatgtttttggtgcactgtaaagattgtccacagtgatcatgtgataactaggctgccatgctcatgaaggattgttgcagttggtgcttgtgatgattaagcatgcagaatcatgtgccatcttacccgtaatgcacgccatttttctctgtgctctgtgtatacgtgtgtgtatgtgttttcatgcatctaggtgtgaataagttaactatgtacacggttccctgcttccccgtgaaccttcacttagaagccacagcttctgttatatatatatttatatatttatatttctgctttgccatgtggctttttaattaaatcagtatattatcttcatacacacatatttatccaatatagaaacagaaatttacggatggaaagaaccataggtccaggacatcgagacagcctgcatctccgtaggtataaccagtaatgttatcattccttacatgagtatttagtgtgtccttgaattctttaagagttgtgaaaatatcagaaggaaatgggatagatgtaattgttgatgtgggaaaatggtatggtcgtgtgggtttctttatcttaacttcataatgtctttgagcacatctctaaactatagtctaccatgcggattatgcacagaaggggaggcatgcatatactttgaggatcagcacgaatatattatgtccagccttcagatgacatcacactcttgctatgtagttgcagctctgaaacagttgggcttaagcagaagcagatggtcctaaacctacaaggttctttattaatcctcaagaaaatgcagtataaatggaatgtgtcaaggtggtcagtggcaggatagtgcggttatcctgcatttgttcagataagcttgtgagcagatcacgtacataatacaccaccagcccaactcgggtcacacagcagttagttattcccattatatcagatgcggtttttggttctacattgtcttctaaaaatattttagagaaaattttataacatggtggaaatcaatggaagaaacacattaaaattaactagaaagtttctacagagccaccaatagtaagcagtaattctagtgcttgtcaattgtgtagagttctttggcaaagtaacattaaaagtaccactgaaaagtagtgtcctgtccctggaatattcagttttgtcttcatatttggagatcaatcctttttaaaataaaagtttgaagaatatttttttcctttctactgaaataaaagggggccaatctttgaaaagcaaaatatttaagaaaaataagtaactttcttatacaacccaaaacatggtttgaggagaaaccatttttttaatgattttcccacccccatttactttgttctgtaaacatggtttatagtcacaacgttatttcagttccaagttatcattgacagtcccagaatgcatcagataagatagctatattttgaataataaaatactgtacccaacctcctccaagttgtcagtaatattcattcttttaaatttgagatagtacactactaataacgaggttaatgcattgtatttttttaaacaaaaataaaagactcatgaaaacctgcataaaatatttatggaaatggagtgtttgaagacaagccaaaatttaagcttaattgcatgaattcctgtcacagttttagttggtttgctgaaaatattgcaagtcacagcactggaataaatagctgtgagaccaaaaggctacacacccagtgtttgaagccttcatttatgtaaaattcctagaaaacgcaagcgcttgtatatttatgtcttaacacatagggaggcactgttgaggtactgcttgttggtttatctgaggaaaaacatttattgatagcaggaaaatatttcagtcttcatttttattgtaggtatcaggattttagtgagtgactagccatatatacgtttagacccgcgtctaggatgacgaggatattctaggtgggaagaagagtacagatgtgctcccagggtgttcagtcacatagaagatagcaagcttcagaagacagttgatacatttcatttggctgaaatcacagtatgcccagtctttttcattttggagctttgtcacataagataaatgaaaaagcaaattgcaaacattgtagaataaaaactttttttattctcacttgaaattttgctttttaacaatatgcaactcttttgatcttaggttagaaacacacaagttctgatactttaattttgacattatattttcttaagaaaagtgttcatcttggttgagtctatgacttgaattaatataatgttatgagtttagctacaccaaataaccagtgatgccattggggtgcctgcctcttcctgcagctcagcagagtgaactgtgaaacataattgtattcctgttttagccttttattgttattttgtcaatgaatgtcaacctgtgatttaatctcattattcacaaagcctcttggattacatctctgatctgtctcttagacttaccttctcctgtctcttcacttttactttgttagtcacgagaaccccaggaattttatctccttggtttttcccttttaatttgctgtgaagctaagacaagttttcttacctttttcttgagccaacagaccttctcaaacagaaaccctcctttgtctttaatcctgctgtcctcaggcccatttctttcctctccccagagtctcagtttcatccatccttgactccacaatgtcttccttgtgcaaataaagcattagaggggattttgagtgggggctgaagtgtgcagggctatagggtttctaggattcctgtcataaagctaacagaattgccctcttccttctgtttacgaaagcagacttcttcatgattcgaacaccttggaggagttttacacaggtctgcctgggcttctcccaaagtggttatacatgaggtagttgcatttttggtctccagataggcatgttagtaagatggaaagcagaaagatgttaaatagtgtcttttaggtttggcagttaattagcaaagatttccaggtctttgtttatggtccttctagattttataagatcaagttgaagatttttcaaaagcaagaatgctctttgtgtaaagtgacacagaggaaggggagagacacatgcaagatttgttagggctgaagattccaagcaacagtgtcaaagctattcttttctatatagttgtaaatgagtgtgtgtttaacaaattcagaagccaagaggaccattccacactgacaaagagcaagctaatacacacaaaatctgattcatctttgttactaggtagctgttagaataatttttattctgagtgatagaagtgaaatgtaaagaattttctctgtaaagaactctgatgctctaaagcaggggtccccaaccccggggctgcagactagtactggtccatggcctgttaggaaccaggctgcacagcaggaggtgagtggtgggtgggtgagcattactgcctgagctccacctcctgtcagtggtggcattagattctcacaggagtgcaaaccctattgtgaaatgtgcatgtgagggatctaggctgcgtactccttatgagaatctaatgataaatgtaacgtgcctgaatcattgaatcatcccaaaactataccccctactcacatctgtggaaaaattgtcttccatgaaagtggtccctggtgccaaaaaggttggggactgctgctctaaggtgactgctgaagtcttcaagtatatcctgatagcaaggtgtagtgttagattttgaaagtctctaaagaccctttcctccttcttgtttatcccttgatctgtctgctgctgaggtgctgttctgttaaggaacaggaggctgcccctccattatgaagtatacatatgaaatctttcctaggaagaggaaattctaaccggcctggaacctgctgtcttcatacgggagattctcttgaagagagcgtgatagtcagaattagctggtgggtgtaatttacctttcatcatttctcatactctgacttgatttttgatccccaggagctgagtggcataggtcacccattttgaagggaagcctatttataagttgcatttggtttttattcaggaagaaaaataacaaataccctctgttctgtttcctaatatttcttatcattggctcatatgttaaaatctatttatatttgtcttaatgattggcagttctaaaattccatctaaaatgaagactttgtactcagaaactagatgatctgtatagtaagaagtcattgtctctttttcatcctacatgagttttactatctttgttcctttcttcttctcagagtagtggccagtagttgtcaaggtttgtcttaaatttcatctgaaaggtaagcatatatgcttgatcttcaagttgtagaaagatgatttagccatatgaataaatttaaagaccaaattatatttgctgagggtgatttataaataaatatgaggtaaccattggtgtcaagtgtgaaccttccattcgattgctagtttgatcagtccacatctaaatgtggaaagttctgtattcctatggcggaagacatgtgtatttgatgtattaaaacctgctgatgtctccagaactaaatttgttcctttgtaggcctctgggttagcggtagctaaaaagcagaaatgtatagtattagcttgtctgattacctgacttccagccctgtacaggtgtgcaggaataaattaacatgagctacctctgatgagccactgcatacattaacgacagaggtgaagatgcgaaaacatgttacctgcctcctgttaccaccttctcagcatagcaacaaccattttttccatcattctctatgtttggaaacttatacagaactttttctagggagggcttttcagtaaatacacatgatttcaccaggcaatacctctaagaaatgagccacttagcaccaattcaagataactattagtatatttgccctaatataattagctgtcaaatacgatgtggtaatcccctccaagtaaaagaggagaacattttaaagcattagctgtttcatttcattgccaatcaaactacaagtctccatttctaaaattctcttacaacatgaagttgtgcaggtcctctgacttctaaatgttaaggaagagttttttttttttccctgctactctatttggtttcacaatagagcaagatcaatagaccttttgtacttatcttccattactttccatcagaagcaaacacacaaaatacatccccctcctgagtaattgctagttgtgccctcctcaagcaaaactttggtagtaagataaacttcagtgtcattcctgtccctggggttctttttagatactgggagaagagcaatgagcaaaacggtctccttgtatcatggggagagactctgtcaagcctaaagtgagcctcggatcttcctaatgacctcctgctggcccagctggatgcaagacaagctcgtttaagcctctgctgacctttcactcctccactacaagaactgcaccactcatttccaccgtcttcagaactgtgcaccaaatagaccacaaagcttcatggctgacgaatgatttccttttcatgatgcaaagagatttttacaaatttctattgatgagagttaacattaagtctcttgtggcattataacctctgttgcacaaatacaatgcttctatataactcttatttttaccttccttataaaggaacaatctactgttcttgccagcattatcttgaaaattcaggccaaaatatctgagcagaatgcacatactgagtgcaccggtggtatttttcatgaagagaccactttgaaagggtcttcctgatttccacctccctcagaatctatctgaccttctcacagactttattggtgtgaatctttcttatatttaaccatttatttgagatgctcatttttgtagcccatcttttctttttaaaaaacatgggctggtttctacccagaagagggtggtaagactgtacatgtacgttaacattcacttgtataactcaggtaagttccgttttgtcttagatgaaaggctgctatcaactcttttgctgtaagtgatcattcgtggttgtactaagaggaagggataccttctttgcctaaatgccatagtgaaggtttagccatgaagcattttttttctttttttaaagccttctcagaaataatgtgcttgccataagactcccacaagcttcaaataaatgaatgtggcagaattggaaagaagcttgtccttgccaaaaaattgcaatgtcataaaagagggatttggtaactttgattcttgagtgccaagatatgtgtatgagggagaggcaggcaagctaagaccgaggaagaaagaatactttttaggaaaggacaatttttcttcagttatttcacataaaactacacttttaaaatatacctagattttatgtcctaatgcaagctgcttgaattaaaacaggagttgtaaattcctggtaaaaagctgttacacctaaagtgttagtgatcctaactctagtactttatagagtttattacttcttttattaactagggggaaaaatgttacccacttctagtttaattctttttgttgcttgctctaattttgactttaccttaggaaagaaaaaaaaagacaagtgtttctaacagaatatatgtaagcgatgcctcggtattgctattgcatatatcaatctgaattattaccagccactcaaaaattgtgctaatgttctaatctaaattcatccacgtaatgtatatgtgtgtttacacataaacatccacataaataagaatatcaaaagacagatcattcttaattgccagaatagacatctacatctcggaaagtgatgtatgaagtaactttatcacattgatgggaaataagatttcgtaagtaaaacaagacccatttgggcaccaagaaccacagacctgcagctggaagccctgtaggtctgatgggcagtggaggggagccgctctaactctgctgcctttttagtctgctctgtcactgagggggcactggtgggtcagttcgctcactcgtaattgtgttttacagacttctaaagcaattggctcagtcagtcccaattcaataaaagtggagagcaagagagagagcacttttgttctattttttacttgaaattatttcattcagcagtctgtcttttttattaccaggacttgacattagcactccaagctatattagcatccatttcagcagttcagtaatggtattaaaaaaacacttaacttcaatggtgaatggttgtatgacagtaccataaaaaatccacattaaaaaaaacttatgtatttgtcccagcaaattatttttcacttgtttaaccacttcaaaactatattctcatgacgggtgttcacgaggactttcttgttctcagcaacagctgacagtggtgctcggttgattagggaactgaggaaagaggaaagggaaatccagtgaagagagggtaggtaaagatgctgtttaccctgtagttagattaccttccattcatcagcagagatggaattggcaacctcagagcacccaaggtgaaattcttggatcctcatgcgtgactgggatttgattttgaacccaacactctccaaacttgggagcaaagcctaactactttggcactgcaatgtgctcataaatgactacattagtttctaaattttgattaaacattcagtaattaatcaatggtagacacgaagcagttggcaaggtccagagctgcaaaatgtttaagacataaaacattacgaagtaattagaatatgctccttcaagagaaggattgccttcaataaagaggtaaatgatagtatcctgtttattgtggacgtaggcagccaaagcaatatgataaactgctggaaacacacatatcagtaatcatccacattattagtgccattaatcataattccaaaaatatgacagcagcagccaactttttgaccaattttgcttctgcctgttggccattataacttcactaatagactgcagagctcctatgcgtggcagtttgcattgagaatggaaggttaattatatttgagctgctgatttcttctctccttggaaaaggcttagcactttgacaatcccaagggctcactgttgttaaatcagtaaaagtactttattgaaattttctttgttggtcaggaatgagatgtttcaaatgagatataagcaccaggctggaacagttgctaatgcttcttgcttcaaagtgatccttgggcagcaagatgaactcagtggtttctttagatcactttgctctctcatttctcgggtaaaaagttcagtgctatatggtgatacaccaggaaatcccacaagattagtggtagtctcaacatgtatctgtatgactgggatgttgggagtggttaataacatcagagggaataagtacttctttaatacaaaatcctgcatttcagactctgcctgtgcaaataaaaagtaaaaagaacttcacaaaaatcatccgtttctaaatattaaaacatttagtagcatgcatgcattgctggttggttaaatgaagttttcatgttttggctggtagttttgacatttaatcaaagttgtaaattagattatgctcactctttttgttcaggtgtctttattagtttcattttcaacacagaattctagataaagccatagctaaatactaatattgattgtcctacaaaatagtgtcacctcccttggggaactcatgcatcctgactgttaccttttaagaagatcataaattaaccattttaggctgggtgtggtggctcacacctgtaattccagcactttgggaggctgaggcaggcagattgctggaggccaggagttcaagaccagcctggccaacatagcaaaaacccatctatactgacaaaaaaaaaaaaaaaagctgggcatggtggcacatgcctgtaaaaattagctcctattattttggaaatatatcttctaaaatctttataaagtaaggctatataaaacaaggaatggaaagcttgagggttaatttgtccagtgtaaatataaaactcaaagctcagatttattctcagtaagtccttaaaagatgccagggctcatggctttgctttttcttacccaacaatagtagtaaactgagcaccatatgagctgcttgattgagaacacttccaaatgctgtgaaaacataatcctgttcacagtgtaacactcatctcacattacagcgcaacaggtacctattgaataatcagcacccttgagaagcctcgatgtctcagatacaactcaaaagtaaaatggttagggaatggggctgctggatatcaattctacacttaacctgtgcatccagctacacattttccatctaccaatctgccttcccaaatgccatcactacattaacattttttatgcattccacagcaatgacaaattgttttctaactgtagggccagatttagtatgcgaaagacatgtttgcctctgccaacaaaccaataattctcactaacgtcttcagagttacaacatttataaagttgcaaagtggagtaaacaaaccatctgtttggcttttccatatatgtcatgctttcttattagcatattacgattcatttagtaaacaaatttggtgatttcgttcacgtcaaagttagatcggaagcttgaagatgattaacattcctgggacaagcacattaatacattgcttcccctgcaaagttaaatggcttctcaggagaatcgccccttgttgacaagatgagactgtcaattttgtctgcctgccacattaggggccatacggggatggcaggctctgagagaggggagtcgtgtaggcagcataattcactgtgaattgagaaaagaagtctaattctgataaatggtcgaccccaatacatcctacctgttattacaacagacgtgccgtatctgtgcagtaaattagctaaacccctaaagagtttggtaggagcttatcttcaagtgaataatttgaatgtagaggaaactgtctgcgtgactagtatggatgatttgttttatattgaaaggggttgaaatgactgagtttcatacttttaatttgcaagaatttgcttagattttgtttcttgcatttaatatgtacttccttacatttggggctttttgagtgttacccactagaatttcacattgaattttcttcctgagctaggggatggttttcagatcttttggacagaatctttaaataataacctgtagaacaactactaattttacagaaaggtatagtgtcaaaagtatcattttgtgcacagagccataagcatcctatcgttaataaatgataatacaaaaatgttgaggtaagtgtaatagatagtgttgtagcaatccagataagaaaaggactaatgaaggcagaagttttaatttttcatttctgtggattttgatagcaggtttacatttctactcaaaagtattgttgactcagtagtcttacaatgtacttaaccctagcatctagacttacccagattggatataaatttatctctctctctcccattctccccatatacatatatgtacacacatacatacagacaaataggcatgcatatggtatgtatatgttattgttacgctatgtatatgttgttatgatcattctgtacaatatcatttgagaatttgtgaatgtgtgtgttgaacggcagagttgagctggaaaataaaggcaaaaactaatccaaagtggggcctcagttatttttcccttgaggcattctaattaattattaagtattttgtttcaattcaccaagttcagaatgtctcaaatctgattaagaattaagacacttcatgcaacctatagcttggttcattattcagtctctgactgccacagtcttactttctaatttggtcatgcaacttgttttttttttttttctttttcgtgtctccccgatatcttaaagccaagtttaaaacctcaaaacactttctttagatagtgtttttgtttttagttttatgggccagacatcacattaaatctaacttaatgtgatgagaaaagagaagtccaaggcaagacttgctttctctctaaagggcatttgcacttacttgactacgtttgatggatttcatgtcttctgtggttgcatggtaaagttttcatcaaaggaacagaaaaagactggtagtccactttagtccagttagagtacttccactcagcatttcaaagaagaaggaagtttggttctgcagcaccctcccctcagtccaaggttttgtaactttttgcttttaagggtgatattggtctttaacaagcttttggtagattcacagtatagaaagagtacagaggtttaaaggaagcatttgtagttccaagcatagcccaagttacagggctttttcaagccctaattttgtggcattcccttataacatactatggtattaatagcgtcaggatcaccgtttgttttgtcgccaccacctttccttggatattctgttacatgagtcctaccttgggatcattgctttcttcccttctacagtgtattttgggaaatactttttgaagactcatgcatattattgatggaagggaaaccaatgtacttttaagtacctcctctgtgcaaagtattctactttacgtgcaggacacataagattgagtaagatttagttatgttcttgaaagtgaacgtctggggctaaggtttggaccactgccttaatgattaccactgcacttcttaagaccaagtccttaccccttatacctatgaactcattttctctctgcattccagtcactttttttctgtaagaggaacttccttccatatatctttcttgccttccaaatcaaagcaagtagaaacaacctttctactgttcatgttcttatagaatgtaagaagttctaatacagtcttagatatttgttattgagtattcttccctctttcctagagataaatattcagaacactaaatctgtttctagaaaaaccatctctgtcgctggagagctcaaaattggttccttgttggattctttgttccaattgttacatacaactgagtagggcttcctctgccagggagtccccctcctgtttccagcactctctggccttcctgccattttagggtcttctctcgacatctgattatcagtaggtgagagttctttctgtgtctctcccaacttctcttttcacctcttcagttttgctgatccggataaacttgtaatagtcctcaaattgctattaaccctaggtctttgtgtctcatgaggacagtattttatgacagctaatggtctggattgactgattcaagagtccaacaataggtctttgttaaaatcaagtgctgtcttttgtcccttctttggagactgaaccgtaacctcttgggtaggatcggtaccctctaaagaattttagtctgctttccttctcgtgctttccttccttccaccttaggaatactgtgtgagtttgtgagaaaatcttcaagcccactatcatgagagtgaacagcagactttcctcagtccatccttcccatctccacttcaagtgttttgcatatggcatttaggaggattattaaacaaaaatgaaatagattaggaattgaacgtaaaagaatcaattctcttgaactgtggttgcataatggaaatcgactaccatgaatgaacccgtgtactgaagttatgaagagcagagctaatgcactgccatgagttcatctttattattgcattacacctgaatcaattgataaagtagctgttttttttaaagtgagggatggcacttaattgaataaaagtcaatgtaattatattagcagaggccaacagtactgctgacagcggaaaagggacactgttgaacagagtgccagagctggtctacacatttctgcacatcgtttggttgacagatattgagggctggtacatcgtctaattagattacagatttctactgctgtaagtgagaaatgaagagaaaatctctttctggtaacatattggtggagatgtgtaatttcacaagtcatcttagggaagatgtgtccatctgggtgatcagtgtgtccttttctcaatgttaatttattcttccttattcagtgtgtcttgatgcaactgctgtgtgtctggctgctgttttctcagcagtgaacctaggaagtggtaactgcagatgtgtgagaagcaacagagttctagattacagtcatcgcaaaatgtgtgctcgtgaaattaagaaagggggagggtgttaaaaataataaacgggtaggatttcatgagctgctcatagttggcagatagttttatcaatagaataatagcgcatagcgtaactctacttccacattcttgtaataactggtggtgttgtacccacatgtcagagtaaagacctcacagtaggcatttcctgcactttgcttagcaacctgcacttggagtcatctgccatctgacaccaaggaaacggggaattactgtgtcagagcagggaccgtggggacaacttctgtttatcattcacatacccacacactgcatgcatctgtttagaactcatttgtggatgatgatgctgtgaatttggtttgtgttaattcgatttatgatttttggattatacagctgatctgaaaatcatcaagacagcgtatgggatgatcgcttatgacagaaaataattttgtgatcagaacgttttaaatccctattttattgtttaagtttttcaaaaccagatgtctagaatgtgaatttgttttctctctctctctttctctttctttctctctctctgtctcttattcttgctttcttttgtgatcgatttagcaaaagattagaaagctgatcttattgtcacaaggtaagctcagccttcctaagtgcagttggagagggctgctgccctctgccccttaaaacccagagtgctgtatattgtcttgtgtggaaaggtggagaagtcttccccacctttcttgtctctgaggcacatacctctcaaccatctctaggaaatatcacccacgtttgtcaccaaatggaatgacacattttggtcttccatacttttaagtataatcgggaggtctgttgaactttatatcagccatttaggtcatttcttttatcacaattacttctccaagctgtagagcttccaccagtattgagaagcttttatgtatctgtagatatgtcagtttattttttggaagggtaaccttcaatttaggtactgttgaacatgtgagcctttgcaggtggagagaggtatgtgcccaagggcactttaaaaataatgggggatataaatacaaagacaatgtttccagatagatgataacatatcaggctttgtaaatcatgatgtccctatggattctctgggacaaatcctgtctttatatatatatatgtaaaaaaatatgtatatgtgtatgtatatacatacatacatacaagcaaagcactgagtgagtagaataaaagttttgcttgtcgaagaagtatgggttccagttgttaaagtaaaggaaccctatgttattgttgtgcttgatttttttgtacttactgtgttttaatttttgtacctctgagttttctttctgttgttcagtgtgattttttttaaaaaggtgggtgggttttatttttttaaaaagtttctgtttttccgtttttgtcttaaagaattaaattttaaagtagaactactcgatgaaaatattttggacactaaaatgcacatacttctaaaaagtaaatgtattttattattagatttaactgggattcccaaatcattctgagaaaaggcattcgtgttgttaaaagacagtctgtaaccctatttcaaattgcttaatctgttaagctattgtttttccttaaaacttgaaatgtggagggtagagacggaagatttcattattttttgaagttatatctaaattatctaggctacttttttaaaaaatgaattttttctatacctcaaaataaagtgtgtgctgtatagaaaagatgtttactttttcttgtttttaggtaaatttagactattccatttagacaagcagaaagtttctattcttttatcctatttaatatatattctaaaatctctgccatgaaattctctgcagctgatgctgctacatagtaaaactaacagagtaatcattgagaaaaaggtgcacgggtttgcattcatcctaccattgacagagtcaactctcttataaaaataatgttaatggaaagttcccctgattgcacctctcaccaccaccactaactcccagatcctgaggatataggggaatgcttgcttttataatggtgtaattagaagtgaatgtgcttatttgatacctagtgaaagctgaatcaattttaaaatgctttcctttttctcacctttccccaccccccatccacgtacccccccttccctcttgttttcctagacacagtgccaacataaacctacatcgtaaactgttgaccaaagaactcgatgacatgggcctggactcgtcgcagccctcccttagcaaggacctccgcgatgaatttttggtgaagatatatggtgcccagcaccccatggggctcgatgtcagggaagacgcctcctctcccgcagggactgaagactcccacctgaacgggtatgggagaggcatggcagaggactacatggtccttgacttgagcaccacctccagcctccagtccagcagcagtatccattcctccagagaatccgacgcaggcagcgatgaggggattcttctcgatgacattgacggggcgagtgacagtggggagtcggcacacaaggccgaggcccctgccctccctggcagcctaggggctgaagtttcaggatctcttatgttcagcagcttgtctgggagcaatggtgggatcatgtgcaacatttgccacaaaatgtacagcaacaaggggaccctgagagtgcactacaaaactgtgcatttgagagaaatgcacaagtgcaaagtcccaggttgcaatatgatgttttcctctgtacgaagccgaaatcggcacagtcagaaccctaatctccacaaaaacattcccttcacttcagtagattagtctcagaatggacactacaaatgccagctctcaccagatggcctacgtgtttgaactgccatagtcagtgtgcgcttatgtacttggggtgtgtgtgtgtgtgtgtgtgtgtgtgcatttatgtatgctctgtggctacatatacacacacgtatttccttgagataaacaagataaacactaggtgcttttgaatttttttcacttccctttatagttttgggaaaggagtgggatctttgatttcagggtgaaaacagagtacccctttaaacacacacacacacacatgcacatacacacacacacacacacacacacacagtgtgcaactagccccagttttgacagaataattcttggtcttccccaaagagacaatttgttgtacccatgactgttgcctgcaaaaataaaagggaaaaaaaagaaaaaagaaacaaaaaggaacttcttatagttgtcttttgtgaactttaaggttttgaaagaatcttcaattaaagcatggcagattcacctgtaaatatttagccttgaggggccattgatgtaaaacaattgtattgatggttgtttaacttttttgtttaatttttacagttacatccagctgttagatatgcaggaaaagatagtttgctggctagctctattcatttatgttagcattaatgcacatttttaaaaaaagaaaaaaacatggtcttgtttttactacctgttagatatagtgctaaagaggtgctggcatgctttacagcacagatctgattttttaaaatgtcctgtactagtacataaatcccgtcatgcactttttttcatacactacaaggggatgtgtaataaccatgcttcttttttatccttaaactattgccatacttcagtaagtgtcttttttaaaaaaaattcacttgtataaaaatggtctggtcagtatagggcacaaatgccaaacaaagtattagtgttaacacaaaactgccaactttgcacaagtttccagaaaagaaaatacaattagtcactcaacataaccacaggccaatttgttggccaccagaaaaccgctttttaaaaaaacacttggtgattctttcaagtgccgaatgttattagaatcaacattgcatccttcttgcttatacgttaagttacataaaaggaaaacaaaattatgtggtgtgaaacagccaaggcatttattcttcagaggcaggataatatttcaggatacaaaagcccaaattacccgctacggaacaaagatgaatacagtaaaagagtcgaacactcatttccaaggccctaacccttatcctttaaaaagaaatcctctgaactgggtcggtctgttgtatggctgtctaatttgttgcaaattctgcagtcgtactataattcaggcctgtttggtagacaaaatcaaaaggcatttaacagcagcagtacttggaagctttgaaaacatgtgctaaacttgaatggagcaacactcctttctgaaaagccagaagaagggggttttaaagcaggatctctcaatgttcagtgttttgtgtttccccacacgatttgtcagagagaaatgaaagcaagcctgaaaccaagcaattgagagtgagaaagaggagagagactattctccaaaccttttttgttttgttttgtttccgatgtttacacatgttgcctgagctggttaaccacatcggcagcctcagctaccacaacatactgactaaatgatgatatttactcaagttcagtctgcagccaaaaccattagggtgtgcattgcagactgttttgttgtcttttttttttcttttttcctttttttttaagtggaggggaaaagaagagataaacaaggaatattttgtcaaacagtacacaataatttaaagagaatgtatttcttttttgcatttaatggcctcagacatttctttcatcagtctaaaagttagaaatatccctttattttaacttttatgtcgtttccatttttcatgtttttgtaattattttttctatgttcacatcagcattcacttccgttaaatttgccaaaggaaactgttaatatgtttctgttgttattattcctgtaggatttattgtacctcacagtatttattgtttcccaaaataagcatcattagttggggattcagtatttttgttgtgaaaatttcagaaacaatagattcttaaagataagctagctatgtctaggagctttatcttttcacctccttcagaggatgctatggggtccattttaattcttcatttgttctacggggaggaaagaccaaaagtatttgcagtacaaaagaaactatatcaaacactatgttaaatgacaagtgtttatggtaaaaagctgaggaattagtaataatcgtttttgttttcttgtactttgaattccccaaagtcttaattgctttattttggtgttgtgttaaattgaacagacagatgttttcctttgttttataccatataagactctgtacagtatgtttgtgaaagattgaactagaataatgaaagtttgtttgcaaacattttggtcctctcagcgttctctgtgttgtgctgttgccccattaccaaatggttagattcaaaaagggtgggaaaagatttttaatatcccaacaaaacattatagaaactctggcttttgcagtgtgcatagactacatgtagttttatgaaaataaatacacatttttatttcagcaactttgaaaagttacactcagttgagttactagaactcatcttgtacaacagcaatgtttagtctgtttaatttaatgtcaaataaaaggtcagatagccctcgtgagtgaattacatagctgtcggcagtcacatcagcaaatgcaccaggcttagaacaaatgtttgttacttgctgcaaaccaagctaatgtgtatagccagttagaaaaagtccagaagtaatgagattctagaagtagagtttcccttgcttggaaacatgaatgtgttcacctgtgttttgtcagagaagtggcaataagtcctggacagctgacactttttaagtatctcccctatttgctactacttttgtgcctcaagtgcccagtcgttacggtggccttctaaatgagtaaataacattttccaatataaagcctatttgcttaaaagggacaggggagtggatggatgtagtacatgcaatggaaaatcataaaatgtacaattcttctgtttccaaagtattgctcgttcttgagtgtgtgcctgagtgtcttgttttgacttaactagaattctagttaagatggtgatcccatggcttatttgcaaacaggaaggataaagagatcagcgttttagtcatggagctcatctttgcccattcctactcatttgctttttcataggagttttttgttgttaaacagtttctctcaagccacatgcattctatgctggctgaaaattaatagtgatgtagatgttcatccgacaagcttttccccatgtgattggttttagccagagtttatcacaggtacaaaattaggcggtatgactgtgcatgttctctagctgatgttgaaacttgtactgtcttgatcatttaaaactatgtttttgtaaatatcaggtttagtccgctttcgggaatatctgcatgctatggaaagagagaaaaaaaggatagataatgaggaatttggtttaaaagtgtgataaaaatccttggcattctttgttctgatattaattgtatttaaataagtcaacccaatgtaactcattccagatcttagtccagctgccctgttcagcctgatgccttttaaaggtttaaaggtgttaatgttttccttttcaacatggcaaacattttttaaaacctttttggcacaatggtgccactgtcctcatagtgttatttctttggtcatgaattttcaggcccttccagtaagaggagaaaggcacttaactggttaacagccccattattatacattgctctaaggaaaaaaaaaaaaaaaaaactttgaatatatcaagaatgggctattccagaggcttctcctcaggagaaactatgcactaggttcccaccaaatacaatgtgacctttttttcccctttctctgtacacaccccagatatgtgccaagcaaatgagaatgagggccgttgacaattaaagcataaagaagctagtcaccagattgagatggacatgctgctaactgctgacagcttgacctgagcagtcctaacttgtatctggtctgttagcattgggttagattgactaacagagtaaataaaattcacctgtcataagacacgctacatctgctatcatcaagaaacaaatcatccagaagaaactttttttcatcctgtggtcacacccttttcttaagagcttcttttttaaaattatgacaaacgaatttcattctttaaaatcacttatcttctcccaaacttgaagtatttaaattaggtggttttgcttttccctctcattgtttattttttggggatggatctaaatgagtaagatgagcaataaaagataccagaaagactggagggatcacagtgttttcatcagaactaagtagagggtcggttcctgccctggttttggggtagctagaaaaggaaatcatgaatgcactggaaatgttggctcgagagaaaagactggcatagctctgcctcgcagtgggtgagagcgtattgatcgtagggacctgcagagttcctatgaccaggtgagtcggctctgaggaaggggttaggaaagcaagtacagctgcatgaaatagctgaagttcctttggggtcaggaagagccgacaattgtggggttttggttgcttttgctttgtttttgagtgggaagtgttgctggaatcccctgagaaccgaaagatgccaggggtcagcaaggctatagaaaaggccagtggtaacacctcgttttcatcctaacagaggagtaggtgcgaatggcaccagcatggatcgttcctttcttgatcattactcatgcttgccactgtagcaacacaacaaagccatgattgtaattaatactaggctaaagaccttgatcaaaatgggagctcatttactgttctatgaggtatgtaagtaacttctcttcacattttccctcagagataaaccacacgtggtagtcttgtttgcgttagtactaaggtcatgtttgatctgtcccagacgagtcgcatatttcctgtagctggagtgttgctcaccataaatggtcattttcaaaaagtattgtgtaattccagctgtacaactgaccagtgagttatctgtcatcactgttgcccacatacccgtccttccttgtgtagtttcatcatcctcatccttcccacatcttgcgcaaaatgattttctgtgctcattcggcaataactatgttattcggcatactgtctttttggcatttgttgaaaaatccaaatgcttttaatccaaaagattaatccaaatcttttttaatccaaatgattttaatccaaatccaaataacaggaggttaaaaaaaaaaaaaaaactaagcatttttacatgtacactgaattggatcagcattattgttcattataatgctatatatatttttggagcaacatactatagttgtcataaaactatctttattcttctcctctaaagtgctgttgtaaattcatttgacctttactgcaggaaaaaaaaaaatcttttttatataggatatgaagaccaaggctcagtctgtaacaaatagtggaccattacaaaagaggaaagaaaaaagccagggctgagcagcaagaagcttcagttcaatttcacctcgtatctttctaataacatacttgtcactttattaccttccagtaatgtgaacgctgctgacaagactgtcacactaacagcagacaacaccctctctgcttcagcccagctctcctggctacttattgccctggccctgaagggacacaaactaatagtgtgctttccagttcagcacttggccatcaaatataaaaggatgcgtaattgcctgtttatccccttgtgaaggagaaattgactacaagggctaggctttcccatcgagttccctgatgtacacacacatccacaatcagtcagtctctctctctctctctctctctctctctctctctctctctctctcccctctctctctccttccctcttattctcccctcctaacatacaagcacatacacacacctactgtatctgtgggaagcccaaggctgcctctcgatgccctctccagctattaagtggacagtaacaagatgacttcttaaataaagggtcagtagagagatgctgtctgtgacggcatcctttgcttctttgaaaacttaagtgttaacaattccatcttgagagtaatgggtgtggccctataattagagcaaattttcctgcaagtcagtggcataagtaagattatattgccccctaatctgtagggaaaagattaaaatatttttcttccccttcaaaaagtgcacatgttgtaaactggttacgcacagtggtcatttttttttcttatccttggcatcaaaccatggacgtaggtgtacaaatgcatctttcaatgacccctccaaatccatagtgtaacatgatagattaacttttgtcaaactggactgacaatctaaaaaagatggcgtcaggcttttgactttaatcgttaaaacaaggaccaccctatgagtaaaaggtaaattctccactttgaagaactttggtaagtacaagtacagggagctttagaaaatcgagtgatggggaccaaaggtacaaaggaagaatacatgaaaatgttatattccaaaatgccctgagcccaaagattggctgctatttttgtatattgaaatactcaaatgatggttggaaagtgactagttagtgactaaatgaagtgcaagatctatcaagcgtcttctttctgggactaggggatgccatgcttccttccaaccttcccgcagcgcatctcagagaagatagttggccccattacaaacagtcacatttcagtaagatattagtcagccaggtaagacacgtgcaggtatcggtatcatcttccatatgaactttagcaaggagagaacagcagcagatttagggatagacaatgtaacaggtctatgttgacaaatctgtgctaaataatttcatgaaccagtgtggggactgggaagaaaagcactttgagcaaggactcttgggttcgagcaaaggcaattagttgacatgatacttcttaagttcctcagtatgtatatgttacaatcgtttatcagacatcttaatagaatcctaattgaaaaaccagttgccaaaattgcacaagttctgctcgctgatactagctttctccccttaactctaaaataccagggatgcttaaggacgtttgtaatagtttttttaatgctttgtttcacttttttaaaaaagaatctttgaagggaaggaagagcagaaagaagtattttaagaaaaatggagagaagtagatagtattgaaagtatatttcttgaagagagagtatctaagtgctataccaagattttatagggcttcctgttgccaaatgtgatgttgagataatgcacagctaagatggcaaatccatcaattattaactggctctgcccacttctgtcatggaatgcaaggattgagaggtgactctggggagaccctgggtgtgtgagagagctccattcatctggccctggatatgtttttcaaaagagagggagaaagcgccagtccctgcaaggtgaactgacctggcactgtttcagtgggagcctcactgcctgccttttccatgctaggagacaaagcatcctctaccccatctgtgaatcggtgctgtggccactgcgagaagcatgattcatgaggtatgatgctcttgagctcccagacaatgtgctgagttaataggttcacttgagatgtatacaccaaggctgtttctttttttaaatctagtccccaatttggagtatttttgcatgtttttgtacagagtaatccattcctctcattgtgtatcttaatctcctctgacttttccattgtctttctcaatcccaccctttgctcttcggatctcaccaaccccccttaaaaaataaatcatgtttgagcaagaaggtagaacacgccctccctcatcttggttttaattgctttggaaacgtgttctaccctgtccagggtttgcataacgtgaattaagtgaatgagatgttctagtattatatcttaacctgataagactatctaagatttctagtatatggtgcatttgctttcctgtgcaaactttggttcagctgccctgcagagaatctcaccattttcctgccagtgccagtataaagaatgcaggagagctaaacctgggtacatgaaggtcagaggggtgaggacggtcgagaaatggggagaagacttgggcttgagacgacctgggcttttcatgtgtagctcactcagcagtatgaggatgactgacacaccagtgggtggtttccaagtgaggcaaatgcccatttcccctctcccctcacaccttgcctggcttcttccatgaagtccttgctgcttttctgcctccccaaaggtgaggggaaggggctggttggggatctgggaaagccagttctctgttctctcctgctggtgatggactaggccttttagaactagcaagatccctcacacagctgggagaacacacacctttcttactccagacccattggtgtgtctccagtaacaaaattattggactcagcctccatatttgacagcaaaagtggccagagggagttgaaatatcttgaagaaaaggaattttcactaagatatgtcctctccctctcccagagtttagctgtttattccttttttttgtttatattgttctcatctgcataaaaccagtctcttgcaataagcctgccgcagaatcaaagtctgtacttcaaaaggtaactgcaccaagggatgggacagtgtgcatcaccctgatctaatcattgtgacgttggtagcttcctaaatactgtatgtaccttgaacaagggttttatttttgttttgttctgttttgctttttgtttttattggtaggctaaggtaattaaattttttaatttgctgttactttggttgtattttctgtactataactgcctacagtatgtcttttgcataaaatgcataagggtttggggatgtaaatggaattttattcatattttgtccaaatacctcttgtaatttgtatcaaaattcttgtacaatttttatattaaagatttatcagtcactga

SEQ ID NO: 5 - RNA, 12926 nt, Homo sapiens
gaggcccggaggaacucggagggggagggagagaaaggccgagacggagggagccagcggcggccgaggggcugguccaggcgcggccgcuaagaggagaccaagaggcgggggcugcacuugacaaccagcaugccgagauggcacaccuugggcccaccccaccuccacauagccuuaauuacaaaucagaggacaggcuuagugagcaagacuggccagcauauuucaaggucccauguugugggguugauacaucucaaauugagucagaagaggcagaaguggaugugagagaaagagagacacagagagacagagagccaaagagggcaagagacuugacuuuaagagacuccuguacugacaacuccaugcaguucggaaccagaacgacuacggcugaaccaggguucauggggacauggcaaaacgcugauacuaaccucuuauucagaaugucccaacaggccauccguugcacacugguaaacugcacaugugaauguuuucagccagggaagauuaaccugaggacuugugaucaguguaaacauggcuggguggcacaugccuuggauaagcucagcacgcagcaccuguaccaccccacccaaguggagauugugcaguccaacgucguguuugacaucagcagccugaugcucuaugggacacaagcagugccugugcggcuaaagauccugcuggaccgucucuucagcguccugaagcaagaggagguacugcacauacugcacggccuuggcuggacucugcgggacuauguccgaggauacauccuucaggaugcugcuggcaaggugcuggaccgcugggccaucaugucucgagaagaggaaaucaucacccuucagcaguuucugcgguuuggagaaaccaaauccauuguggagcugauggcaauucaggagaaagaagggcaggccguggcuguaccaucuucaaagacagacucagauauaaggacuuucauugagagcaauaaucgcaccaggagucccagccuccuugcucacuuagagaacagcaauccuuccagcauucaucacuucgaaaacaucccaaacagccuugcauuucugcuuccauuccaguacauaaacccugucucagcaccacugcuaggguugccuccaaaugggcuacuguuagagcaaccaggguugaggcugcgggaacccagccuuucaacucagaaugaauauaaugagagcagcgaauccgaaguuucucccacaccuuauaagaaugaucaaacacccaauagaaaugcccugaccagcauuacuaauguggagcccaaaaccgagccagccugugucucucccauucagaauucugccccagucagugaucuaaccaaaacugaacacccaaaaagcucauuccggauucaucggaugagaaggauggggucagccucuaggaaaggaagaguguucuguaaugcaugugggaagacauucuaugacaaagguacucucaaaauucauuacaaugcuguucaccugaagaucaaacaucgaugcaccauugaagguugcaacauggucuuuagcucccuccgaagucguaaucgccacagugcaaaccccaauccucgccuucacaugccuaugcuaaggaauaaccgagauaaagauuuaauucgggccaccucaggagcugccaccccugucauagcaaguacaaaaucaaaucuggcacucacaagcccuggccgacccccaauggguuuuaccacucccccucuagacccugucuugcaaaauccucucccuagccagcuaguauuuucugggcuaaagacuguacaaccaguuccuccauuuuauagaaguuuacucacuccaggggaaauggugaguccuccaaccucccucccaaccagucccaucauuccaaccagugguaccauagagcagcaccccccgccacccucugagccaguagugccagcagugaugauggccacccaugagcccagugcugaccuggcacccaagaaaaagcccaggaagucaagcaugccugugaagauugagaaggaaauuauugauaccgccgaugaguuugaugaugaagaugaugaccccaaugaugguggagcuguggucaaugacaugagccaugacaaucauugucacucccaagaggagaugagcccaggcaugucugugaaggacuuuucuaagcauaacaggacccggugcauuucaaggacugaaauaaggagggccgacagcaugacuucugaagaccaagaaccugagcgggacuaugagaacgagucugagucuucggagcccaaacugggcgaggaauccauggaaggggaugagcacauucacagcgaagugagugaaaaaguccugaugaauagugagaggccugaugagaaccacagugagcccucucaccaggacgucaucaaggugaaggaagaauuuacagaccccacuuacgacauguuuuacaugagccaguauggacuguacaauggugggggugccagcauggccgccuugcaugagagcuuuacaucgucucugaauuauggcagcccucaaaaguucuccccagaaggugaccuauguucuagcccagaccccaaaaucuguuaugugugcaagaagaguuucaaaagcuccuacagugugaaacuucacuacaggaacguucacuugaaagagaugcacgucugcacaguggcugguugcaaugcugcauuccccucucgccgaagccgagacagacacagugccaacauaaaccuacaucguaaacuguugaccaaagaacucgaugacaugggccuggacucgucgcagcccucccuuagcaaggaccuccgcgaugaauuuuuggugaagauauauggugcccagcaccccauggggcucgaugucagggaagacgccuccucucccgcagggacugaagacucccaccugaacggguaugggagaggcauggcagaggacuacaugguccuugacuugagcaccaccuccagccuccaguccagcagcaguauccauuccuccagagaauccgacgcaggcagcgaugaggggauucuucucgaugacauugacggggcgagugacaguggggagucggcacacaaggccgaggccccugcccucccuggcagccuaggggcugaaguuucaggaucucuuauguucagcagcuugucugggagcaauggugggaucaugugcaacauuugccacaaaauguacagcaacaaggggacccugagagugcacuacaaaacugugcauuugagagaaaugcacaagugcaaagucccagguugcaauaugauguuuuccucuguacgaagccgaaaucggcacagucagaacccuaaucuccacaaaaacauucccuucacuucaguagauuagucucagaauggacacuacaaaugccagcucucaccagauggccuacguguuugaacugccauagucagugugcgcuuauguacuuggggugugugugugugugugugugugugugcauuuauguaugcucuguggcuacauauacacacacguauuuccuugagauaaacaagauaaacacuaggugcuuuugaauuuuuuucacuucccuuuauaguuuugggaaaggagugggaucuuugauuucagggugaaaacagaguaccccuuuaaacacacacacacacacaugcacauacacacacacacacacacacacacacagugugcaacuagccccaguuuugacagaauaauucuuggucuuccccaaagagacaauuuguuguacccaugacuguugccugcaaaaauaaaagggaaaaaaaagaaaaaagaaacaaaaaggaacuucuuauaguugucuuuugugaacuuuaagguuuugaaagaaucuucaauuaaagcauggcagauucaccuguaaauauuuagccuugaggggccauugauguaaaacaauuguauugaugguuguuuaacuuuuuuguuuaauuuuuacaguuacauccagcuguuagauaugcaggaaaagauaguuugcuggcuagcucuauucauuuauguuagcauuaaugcacauuuuuaaaaaaagaaaaaaacauggucuuguuuuuacuaccuguuagauauagugcuaaagaggugcuggcaugcuuuacagcacagaucugauuuuuuaaaauguccuguacuaguacauaaaucccgucaugcacuuuuuuucauacacuacaaggggauguguaauaaccaugcuucuuuuuuauccuuaaacuauugccauacuucaguaagugucuuuuuuaaaaaaaauucacuuguauaaaaauggucuggucaguauagggcacaaaugccaaacaaaguauuaguguuaacacaaaacugccaacuuugcacaaguuuccagaaaagaaaauacaauuagucacucaacauaaccacaggccaauuuguuggccaccagaaaaccgcuuuuuaaaaaaacacuuggugauucuuucaagugccgaauguuauuagaaucaacauugcauccuucuugcuuauacguuaaguuacauaaaaggaaaacaaaauuauguggugugaaacagccaaggcauuuauucuucagaggcaggauaauauuucaggauacaaaagcccaaauuacccgcuacggaacaaagaugaauacaguaaaagagucgaacacucauuuccaaggcccuaacccuuauccuuuaaaaagaaauccucugaacugggucggucuguuguauggcugucuaauuuguugcaaauucugcagucguacuauaauucaggccuguuugguagacaaaaucaaaaggcauuuaacagcagcaguacuuggaagcuuugaaaacaugugcuaaacuugaauggagcaacacuccuuucugaaaagccagaagaaggggguuuuaaagcaggaucucucaauguucaguguuuuguguuuccccacacgauuugucagagagaaaugaaagcaagccugaaaccaagcaauugagagugagaaagaggagagagacuauucuccaaaccuuuuuuguuuuguuuuguuuccgauguuuacacauguugccugagcugguuaaccacaucggcagccucagcuaccacaacauacugacuaaaugaugauauuuacucaaguucagucugcagccaaaaccauuagggugugcauugcagacuguuuuguugucuuuuuuuuuucuuuuuuccuuuuuuuuuaaguggaggggaaaagaagagauaaacaaggaauauuuugucaaacaguacacaauaauuuaaagagaauguauuucuuuuuugcauuuaauggccucagacauuucuuucaucagucuaaaaguuagaaauaucccuuuauuuuaacuuuuaugucguuuccauuuuucauguuuuuguaauuauuuuuucuauguucacaucagcauucacuuccguuaaauuugccaaaggaaacuguuaauauguuucuguuguuauuauuccuguaggauuuauuguaccucacaguauuuauuguuucccaaaauaagcaucauuaguuggggauucaguauuuuuguugugaaaauuucagaaacaauagauucuuaaagauaagcuagcuaugucuaggagcuuuaucuuuucaccuccuucagaggaugcuaugggguccauuuuaauucuucauuuguucuacggggaggaaagaccaaaaguauuugcaguacaaaagaaacuauaucaaacacuauguuaaaugacaaguguuuaugguaaaaagcugaggaauuaguaauaaucguuuuuguuuucuuguacuuugaauuccccaaagucuuaauugcuuuauuuugguguuguguuaaauugaacagacagauguuuuccuuuguuuuauaccauauaagacucuguacaguauguuugugaaagauugaacuagaauaaugaaaguuuguuugcaaacauuuugguccucucagcguucucuguguugugcuguugccccauuaccaaaugguuagauucaaaaagggugggaaaagauuuuuaauaucccaacaaaacauuauagaaacucuggcuuuugcagugugcauagacuacauguaguuuuaugaaaauaaauacacauuuuuauuucagcaacuuugaaaaguuacacucaguugaguuacuagaacucaucuuguacaacagcaauguuuagucuguuuaauuuaaugucaaauaaaaggucagauagcccucgugagugaauuacauagcugucggcagucacaucagcaaaugcaccaggcuuagaacaaauguuuguuacuugcugcaaaccaagcuaauguguauagccaguuagaaaaaguccagaaguaaugagauucuagaaguagaguuucccuugcuuggaaacaugaauguguucaccuguguuuugucagagaaguggcaauaaguccuggacagcugacacuuuuuaaguaucuccccuauuugcuacuacuuuugugccucaagugcccagucguuacgguggccuucuaaaugaguaaauaacauuuuccaauauaaagccuauuugcuuaaaagggacaggggaguggauggauguaguacaugcaauggaaaaucauaaaauguacaauucuucuguuuccaaaguauugcucguucuugagugugugccugagugucuuguuuugacuuaacuagaauucuaguuaagauggugaucccauggcuuauuugcaaacaggaaggauaaagagaucagcguuuuagucauggagcucaucuuugcccauuccuacucauuugcuuuuucauaggaguuuuuuguuguuaaacaguuucucucaagccacaugcauucuaugcuggcugaaaauuaauagugauguagauguucauccgacaagcuuuuccccaugugauugguuuuagccagaguuuaucacagguacaaaauuaggcgguaugacugugcauguucucuagcugauguugaaacuuguacugucuugaucauuuaaaacuauguuuuuguaaauaucagguuuaguccgcuuucgggaauaucugcaugcuauggaaagagagaaaaaaaggauagauaaugaggaauuugguuuaaaagugugauaaaaauccuuggcauucuuuguucugauauuaauuguauuuaaauaagucaacccaauguaacucauuccagaucuuaguccagcugcccuguucagccugaugccuuuuaaagguuuaaagguguuaauguuuuccuuuucaacauggcaaacauuuuuuaaaaccuuuuuggcacaauggugccacuguccucauaguguuauuucuuuggucaugaauuuucaggcccuuccaguaagaggagaaaggcacuuaacugguuaacagccccauuauuauacauugcucuaaggaaaaaaaaaaaaaaaaaacuuugaauauaucaagaaugggcuauuccagaggcuucuccucaggagaaacuaugcacuagguucccaccaaauacaaugugaccuuuuuuuccccuuucucuguacacaccccagauaugugccaagcaaaugagaaugagggccguugacaauuaaagcauaaagaagcuagucaccagauugagauggacaugcugcuaacugcugacagcuugaccugagcaguccuaacuuguaucuggucuguuagcauuggguuagauugacuaacagaguaaauaaaauucaccugucauaagacacgcuacaucugcuaucaucaagaaacaaaucauccagaagaaacuuuuuuucauccuguggucacacccuuuucuuaagagcuucuuuuuuaaaauuaugacaaacgaauuucauucuuuaaaaucacuuaucuucucccaaacuugaaguauuuaaauuaggugguuuugcuuuucccucucauuguuuauuuuuuggggauggaucuaaaugaguaagaugagcaauaaaagauaccagaaagacuggagggaucacaguguuuucaucagaacuaaguagagggucgguuccugcccugguuuugggguagcuagaaaaggaaaucaugaaugcacuggaaauguuggcucgagagaaaagacuggcauagcucugccucgcagugggugagagcguauugaucguagggaccugcagaguuccuaugaccaggugagucggcucugaggaagggguuaggaaagcaaguacagcugcaugaaauagcugaaguuccuuuggggucaggaagagccgacaauugugggguuuugguugcuuuugcuuuguuuuugagugggaaguguugcuggaauccccugagaaccgaaagaugccaggggucagcaaggcuauagaaaaggccagugguaacaccucguuuucauccuaacagaggaguaggugcgaauggcaccagcauggaucguuccuuucuugaucauuacucaugcuugccacuguagcaacacaacaaagccaugauuguaauuaauacuaggcuaaagaccuugaucaaaaugggagcucauuuacuguucuaugagguauguaaguaacuucucuucacauuuucccucagagauaaaccacacgugguagucuuguuugcguuaguacuaaggucauguuugaucugucccagacgagucgcauauuuccuguagcuggaguguugcucaccauaaauggucauuuucaaaaaguauuguguaauuccagcuguacaacugaccagugaguuaucugucaucacuguugcccacauacccguccuuccuuguguaguuucaucauccucauccuucccacaucuugcgcaaaaugauuuucugugcucauucggcaauaacuauguuauucggcauacugucuuuuuggcauuuguugaaaaauccaaaugcuuuuaauccaaaagauuaauccaaaucuuuuuuaauccaaaugauuuuaauccaaauccaaauaacaggagguuaaaaaaaaaaaaaaaacuaagcauuuuuacauguacacugaauuggaucagcauuauuguucauuauaaugcuauauauauuuuuggagcaacauacuauaguugucauaaaacuaucuuuauucuucuccucuaaagugcuguuguaaauucauuugaccuuuacugcaggaaaaaaaaaaaucuuuuuuauauaggauaugaagaccaaggcucagucuguaacaaauaguggaccauuacaaaagaggaaagaaaaaagccagggcugagcagcaagaagcuucaguucaauuucaccucguaucuuucuaauaacauacuugucacuuuauuaccuuccaguaaugugaacgcugcugacaagacugucacacuaacagcagacaacacccucucugcuucagcccagcucuccuggcuacuuauugcccuggcccugaagggacacaaacuaauagugugcuuuccaguucagcacuuggccaucaaauauaaaaggaugcguaauugccuguuuauccccuugugaaggagaaauugacuacaagggcuaggcuuucccaucgaguucccugauguacacacacauccacaaucagucagucucucucucucucucucucucucucucucucucucucucucucuccccucucucucuccuucccucuuauucuccccuccuaacauacaagcacauacacacaccuacuguaucugugggaagcccaaggcugccucucgaugcccucuccagcuauuaaguggacaguaacaagaugacuucuuaaauaaagggucaguagagagaugcugucugugacggcauccuuugcuucuuugaaaacuuaaguguuaacaauuccaucuugagaguaauggguguggcccuauaauuagagcaaauuuuccugcaagucaguggcauaaguaagauuauauugcccccuaaucuguagggaaaagauuaaaauauuuuucuuccccuucaaaaagugcacauguuguaaacugguuacgcacaguggucauuuuuuuuucuuauccuuggcaucaaaccauggacguagguguacaaaugcaucuuucaaugaccccuccaaauccauaguguaacaugauagauuaacuuuugucaaacuggacugacaaucuaaaaaagauggcgucaggcuuuugacuuuaaucguuaaaacaaggaccacccuaugaguaaaagguaaauucuccacuuugaagaacuuugguaaguacaaguacagggagcuuuagaaaaucgagugauggggaccaaagguacaaaggaagaauacaugaaaauguuauauuccaaaaugcccugagcccaaagauuggcugcuauuuuuguauauugaaauacucaaaugaugguuggaaagugacuaguuagugacuaaaugaagugcaagaucuaucaagcgucuucuuucugggacuaggggaugccaugcuuccuuccaaccuucccgcagcgcaucucagagaagauaguuggccccauuacaaacagucacauuucaguaagauauuagucagccagguaagacacgugcagguaucgguaucaucuuccauaugaacuuuagcaaggagagaacagcagcagauuuagggauagacaauguaacaggucuauguugacaaaucugugcuaaauaauuucaugaaccaguguggggacugggaagaaaagcacuuugagcaaggacucuuggguucgagcaaaggcaauuaguugacaugauacuucuuaaguuccucaguauguauauguuacaaucguuuaucagacaucuuaauagaauccuaauugaaaaaccaguugccaaaauugcacaaguucugcucgcugauacuagcuuucuccccuuaacucuaaaauaccagggaugcuuaaggacguuuguaauaguuuuuuuaaugcuuuguuucacuuuuuuaaaaaagaaucuuugaagggaaggaagagcagaaagaaguauuuuaagaaaaauggagagaaguagauaguauugaaaguauauuucuugaagagagaguaucuaagugcuauaccaagauuuuauagggcuuccuguugccaaaugugauguugagauaaugcacagcuaagauggcaaauccaucaauuauuaacuggcucugcccacuucugucauggaaugcaaggauugagaggugacucuggggagacccugggugugugagagagcuccauucaucuggcccuggauauguuuuucaaaagagagggagaaagcgccagucccugcaaggugaacugaccuggcacuguuucagugggagccucacugccugccuuuuccaugcuaggagacaaagcauccucuaccccaucugugaaucggugcuguggccacugcgagaagcaugauucaugagguaugaugcucuugagcucccagacaaugugcugaguuaauagguucacuugagauguauacaccaaggcuguuucuuuuuuuaaaucuaguccccaauuuggaguauuuuugcauguuuuuguacagaguaauccauuccucucauuguguaucuuaaucuccucugacuuuuccauugucuuucucaaucccacccuuugcucuucggaucucaccaaccccccuuaaaaaauaaaucauguuugagcaagaagguagaacacgcccucccucaucuugguuuuaauugcuuuggaaacguguucuacccuguccaggguuugcauaacgugaauuaagugaaugagauguucuaguauuauaucuuaaccugauaagacuaucuaagauuucuaguauauggugcauuugcuuuccugugcaaacuuugguucagcugcccugcagagaaucucaccauuuuccugccagugccaguauaaagaaugcaggagagcuaaaccuggguacaugaaggucagaggggugaggacggucgagaaauggggagaagacuugggcuugagacgaccugggcuuuucauguguagcucacucagcaguaugaggaugacugacacaccagugggugguuuccaagugaggcaaaugcccauuuccccucuccccucacaccuugccuggcuucuuccaugaaguccuugcugcuuuucugccuccccaaaggugaggggaaggggcugguuggggaucugggaaagccaguucucuguucucuccugcuggugauggacuaggccuuuuagaacuagcaagaucccucacacagcugggagaacacacaccuuucuuacuccagacccauuggugugucuccaguaacaaaauuauuggacucagccuccauauuugacagcaaaaguggccagagggaguugaaauaucuugaagaaaaggaauuuucacuaagauauguccucucccucucccagaguuuagcuguuuauuccuuuuuuuuguuuauauuguucucaucugcauaaaaccagucucuugcaauaagccugccgcagaaucaaagucuguacuucaaaagguaacugcaccaagggaugggacagugugcaucacccugaucuaaucauugugacguugguagcuuccuaaauacuguauguaccuugaacaaggguuuuauuuuuguuuuguucuguuuugcuuuuuguuuuuauugguaggcuaagguaauuaaauuuuuuaauuugcuguuacuuugguuguauuuucuguacuauaacugccuacaguaugucuuuugcauaaaaugcauaaggguuuggggauguaaauggaauuuuauucauauuuuguccaaauaccucuuguaauuuguaucaaaauucuuguacaauuuuuauauuaaagauuuaucagucacuga

SEQ ID NO: 6 - protein, 1099 aa, Homo sapiens
MAHLGPTPPPHSLNYKSEDRLSEQDWPAYFKVPCCGVDTSQIESEEAEVDVRERETQRDREPKRARDLTLRDSCTDNSMQFGTRTTTAEPGFMGTWQNADTNLLFRMSQQAIRCTLVNCTCECFQPGKINLRTCDQCKHGWVAHALDKLSTQHLYHPTQVEIVQSNVVFDISSLMLYGTQAVPVRLKILLDRLFSVLKQEEVLHILHGLGWTLRDYVRGYILQDAAGKVLDRWAIMSREEEIITLQQFLRFGETKSIVELMAIQEKEGQAVAVPSSKTDSDIRTFIESNNRTRSPSLLAHLENSNPSSIHHFENIPNSLAFLLPFQYINPVSAPLLGLPPNGLLLEQPGLRLREPSLSTQNEYNESSESEVSPTPYKNDQTPNRNALTSITNVEPKTEPACVSPIQNSAPVSDLTKTEHPKSSFRIHRMRRMGSASRKGRVFCNACGKTFYDKGTLKIHYNAVHLKIKHRCTIEGCNMVFSSLRSRNRHSANPNPRLHMPMLRNNRDKDLIRATSGAATPVIASTKSNLALTSPGRPPMGFTTPPLDPVLQNPLPSQLVFSGLKTVQPVPPFYRSLLTPGEMVSPPTSLPTSPIIPTSGTIEQHPPPPSEPVVPAVMMATHEPSADLAPKKKPRKSSMPVKIEKEIIDTADEFDDEDDDPNDGGAVVNDMSHDNHCHSQEEMSPGMSVKDFSKHNRTRCISRTEIRRADSMTSEDQEPERDYENESESSEPKLGEESMEGDEHIHSEVSEKVLMNSERPDENHSEPSHQDVIKVKEEFTDPTYDMFYMSQYGLYNGGGASMAALHESFTSSLNYGSPQKFSPEGDLCSSPDPKICYVCKKSFKSSYSVKLHYRNVHLKEMHVCTVAGCNAAFPSRRSRDRHSANINLHRKLLTKELDDMGLDSSQPSLSKDLRDEFLVKIYGAQHPMGLDVREDASSPAGTEDSHLNGYGRGMAEDYMVLDLSTTSSLQSSSSIHSSRESDAGSDEGILLDDIDGASDSGESAHKAEAPALPGSLGAEVSGSLMFSSLSGSNGGIMCNICHKMYSNKGTLRVHYKTVHLREMHKCKVPGCNMMFSSVRSRNRHSQNPNLHKNIPFTSVD

SEQ ID NO: 7 - DNA, 30123 bp, Homo sapiens
cgtcaggggcaggggagggacggcgcaggcgcagaaaagggggcggcggactcggcttgttgtgttgctgcctgagtgccggagacggtcctgctgctgccgcagtcctgccagctgtccgacaatgtcgtcccacctagtcgagccgccgccgcccctgcacaacaacaacaacaactgcgaggaaaatgagcagtctctgcccccgccggccggcctcaacagtgagtgcggggccgaggctctgtgaaggggatgggggaggaggagcagccccggccgccgccaccggcgcggcgcgggaggcgggaggagaaggcagctcattggctcaggcatgggatgtccaggtgactgacagctcccgtcccctgtcaagaggaggggcgcctgccttgctccgggcctctctgttgcctcctggggtcttgggcccggggccgtttgggctcgcggtccgggagcggcgcgggtagcgcggatccccctggtgcggggggtggtccccagcagcggagccgggcggggcggggcgggggcgggcctggggggcggggaggccgggtgggcggagcgggccgcggaggggacgtgggccgggatggggacgtgcggcggggacgccgggggatggacgcgcgggagcggggcggggcgggcggctgccgcgggacgtgtcggggatcaggtgtgcggggctcgcgggcgggcagcgtctggcgggcgcgggagccccccagcgagcattcctttgttgccacacgtttgtcaggaaaattcatttgctcgtctagggttggcttcagtcacgtgtggggtgagaggctgtgccttgcttctcctttttccttttttatttttttattagatttctcgaagttgcccaagtgatttttttttttttaaagcgatgggttgtgcgcccagtaaagctgagagcagcctcctgaaccacccaagattgcacacgtcagggagtctggggccatgcatttaaagaaacggaattaaaaacgcactcgggcagttgaaagttaacggacgaggctgatagacaacccaggccagggtcttttcataacattccgctgcccagacatcttgtcctcagattgttcctagtcgtgagaaccgggagccttcttggaagggttcttgcctaacctttctttaattcaactcttgggaaagaggtaatgggagcagtgagcatatggccagatgaagtcttttcaaaaccacttggatgcttaaaggtcatgcagtatctttcgtaagagggaggtgcttccagtgtggcctgaagattattttagggaagagagtttcagccctcaccaggtagcgatggagtttggagattttaagatggatgctgctgctccaggttttgatgggttaattcccaaaacctttaagtgtcatatattccagaatgtaagatggttatattatttcccacagtaaattaggatgaatgtatgagtctttaaacgttacttgtatcacatattcctatgcaattttaagttatttgcccatgtttagcatactgtcttagattttagaatgggaagaaacttcagagctagctaactgcctcctgttgtttgcctgtagagaaacaggtctagagtaaatggccttgtccaagttcacaaccggctgggagcaaagcagaggttctcatgttcagcctgtctactgctcttttgaggacatttttttttttttttttttttttttgaggtagagtctcgctctgtctacaacctccgcctcccaggttcaagcgattcttctgcctcagcctcccgagtagctgggactacaggtgcctgccacccgcccagctaatttttgtatttttagtagagacgaagtttcgccatgtagctgggattacaggcgcccgacaccaagctaggctaatttttgtattttcagtagagagggggttgttggtctctcaccatgttggccaggctggtctcaaactcctgacctcacgtcatccgcccgcctgggcctcccaaagtgctgggattacaggcttgagccatcgcaccggcttcttttcagtggtgcagaacctcctgctggtgtgtgtgtcttattttgtcagtgtgttattctacctaattgacaaaggtggccaacctttctgtttctttttagtattgtttcttaattgtacagttttcttatgagtgaagatacttggtaggtgtacgtgatttcactgaaagcaaagggattttcatcttcctttgaccctttaacaacaacaacaaaaagggctgagccaggcagggcacgatggctcacacctgtcatcctagcactttgggaggccaaagcgagtggatcacttgaggtcaggagttcgagaccagcctggccaacatggtgagagaacaaccccctctctactgaaaatacaaaaattagcctggcttggtgttgggcgcctgtaatcccagctattcaggcggctgaggcaggagaatcgcttgaatccgggaggcagaggttgcagtgagccgagatcacgccactgcactccagcctgggtgacagagcaagactctgtctcaaaaaaaaaaaggggcgagggcgggggctgagccatatgtcattgtttatcttggtgtctgacagacctatgaggagtttgatgtctttggccagtcggttcctgcttggctgacatcagctcttacagaggtggaagtacactcagcctgcatgggacatcaaaatgttgctttgggacatctgctagatagaaagtattttgtgtgggatagggtgagctttctgaaaagcttttagatattgccatatttaattactcccttcttgcctctcactctgttcgtttttttagctcattacacaacactgtactgaacaaaacaagaagcctcattgaattccttgaagtgatttttgggcaatgggcaaaacaacttattcaggcatctagtactatccaaattgctgataagtcgaaggactttgttgggtaaagttgcacaactgaaaaacaggagaagaaatgtacagattatcttgcgtttgggattttatctttggttcaggggtcaaagcagggtttcaatagcaaattactgaagtatttgaatagtgaagtatttttgtgatttttttttaactttaccgctgtggagagactgttcactttcattaaaaattacagggcaaatacccaaactccttccaagtcaaaaggatgttgtccagtttgttttattgttaagaaaactatcaacttccttaagaatgtttgaataagattcaatagggccgaataaggaaaatcaaagtagtagtgtaaatcgtagtataattcttgttgttgagaagtatagccttttttttcttttcaaattttcttgttcttttttgttttttgttttgttgagacagggtcttgctttgtcacccaaactggagtgcagtggtacagtcatagctcatggcagcttagacctcctgggctcaagtgatcctcctgcctcagcctcccaagtagctaggactgcaggtgtgcacccccacatccagctaattattttatttcttgtagagttcgagtttcactttgtcacccaggctggtcaccggctaacttattttttgtagagatggagttttgctttgttgcccaagctggtcacaaactcttttttttaaatagaaacatcttcaagcacaatgtccttgctttcttgttatgaagagtgctcttaaggccttcatggattgtcactgcctcataataatgttttgaatacctacgtaacttgtatgtaaatacatactgctgcaaaaagaccaacttttcaaaaatttatttatttatttttttatttaagaagaatgccagtaactcttgttggcctggtctggatttcagcatcaggttggcctggtctggattcctttcaataatgaatgaaaagctttgaggaaagaatgtaaatataatgaaatttcaaaagagttacatgtgggccttgaaaagttagggggaaagatgaggagaaatactcttcattctctcctccccttgtcccaaagctcctctcttcttcttcttgcaagaggattgaactagtgattataaaactgtaaagattatacaacatacggcaatgagtataatcacaattattggaccacccttcacagtctattatgttagagaacggagaagcattcacagaagtttctctgaatctcttagtcattcccaaaaacccaaaccagaaaatatctcatgtcattgtatgttatgtacaaattggcataaggaacagctcttagtttgtaaagtcttttagataatggagaaagcttccagcttttagttttcaagcttgatcattaggaggagaattcactctgtggttgttttctactttgtgttgcttggacagcacaaacctcttatctagccttgtttcctttccaagtaaaaagggactttgtgaggattggtagagttagaacactaagaaattctgaggctgtaaatcaggaacaaatcgggtgatgggaaacagacgtgttgttcatctattgaggaagacacatttgcttttttatgtgttactcaaaagattaatatgtagcctcttaatgcctgtgtacataactttctctgtaccactatgtatttccatagatgatatttttgaaagagaattacccttaattaattaaaggaaatctacacttttaaggctgttaatacctattgtcaaattattctccagaatgttcactgaagccctaattgtaataacaaagtattagaaacaaccatctcagtagtagttaaccattgccatttagataatggttaaagtatggtatatctttataaaagatgagatgcaatgcagttgttcaaaagaatgaatgtcagtatatattgatagggaagacatctgaaaaacgacttacagaatatgtcagtatgtgtgtatggtacagttccatttctttataaaaacaaaagcaaaaacagacctatatttcattgacaaaaactctgcaagtctccatgtgaaactgtcaaaagtggctcctttgggagtaggaacgggaggttgggagagatgttaatttttaattttatgtactgatgtttacgttttctaggaacacatttttccagtaaggaatggtttttctatgatatagaatataattgtagtagctaaaactttcttagggacctttcttattgttctgcgtgctatattcatttaatcctcctaacaaagtcttcgaggtagatacagttattatctctattttatagatgagaaaactgaggcacaaagaggttaagtaccctgtgcgagggtaacagctataactgagagtgggagcctggcttcagtctcagcccctgaccacactataccagtgtatcccaagtacaaattgtccgccttaagtagaaatgctttcagttatgattcagggtgtggaggccacagcagagatcacttttactaagcttttctaggtatgtctctttcaggttccaaaagtatatattggattatgattgcttatgtgtttttaatgaagaaaataggatccagacattgatttgaaagtccttcaaaaaagtaaaaaccaggttgggagcagtggctcatacctgtaagcccagcactttgggaggctgaggtgggaggattgctgaagcccaggagtttgagaccaacctgggcaatgtagggagaccctgtctctactaaataaataaataaataaataaataaataaataagtcgggcatggtggcatgtgccctgtagtcccagcttcttgggaggctgaggtgggaggattgcttgggcccaggaatcaaggccgcagtgagctgtgattgtgccactgtactacagcctgggtgacaatgcaagactgtctcaaaagaaaaacaaaagtaaggaccagaaaacctgatattgtttgttacacccttttttctcttcgattgcctacttcaagtgaatattaattgtattttagggaagactgacttccacagagacctatctggaactcctggttccttacctctgcttctgtcagagcagctctgggttttggtttgttactattgtacacattaggcttctatacaagaagaactggtcccattggtttaaaaataagtttgaaaatcctagaaacagtgagagtcagaaaaaaaaactgtttttatatacatattctctcccccaccccctttctctccagttgaaatatgttgcagagctctaaatttagggatgcttttggcgtatttcttatacactccagaggcactcgagataaattatcttcaatgttagatctctcttagctttgctagttgtatttgttaatccattttgagttctctagcctgtgtccattttatgtgtgtatagaatgaggccatggagatgttgtacaactgtgtcgtttggcagcagagtcctaaggaattggtggtgactatgggatggtggtagccactggggctgcctcaaatggaaaggaaagggttctaagtatttataaaagaaaattctagtgtataactgagcatcttctatttaccagcacttgatactactaaatcgtcacagcaccccggtgttattattatctctgtttacaaatgaggaagctgaagctcaggtcacacaggtagacaggaagtgatggggtcagattcccagctaggtctgccttggagctttccttcttgtgagggtgatgttcagttcactctggaactggtgtagccatcgccacatttagagtgcattttagagtttgagccagttttgatgattttacttcaacttactgatggaactccttgttcatccctggaactctctaacacttctgctgggagtttagagggatggccacaccaagctgcttgggtacattttctaaaacaaaatttattgtaagaaatggaaattatgaacaaaatataccactatctctttttgctgtgaagttaagtttattggctactgttaacaatttatttacttacttacttactattcttttgtagagacagggtcttgccatgttccccaggctggtgtcaaactcctggattcaagcaatcctggtgcctcagcctcccaaagtgctgggattacatgtgtgagccactgtacctggcctcaactcttgttaaaattaaagcaccttaatacgtttagcaaactcatcagaccaataaatattttcaagatgtatgcagaattaccagtggcacatcccctttttctgtggctccaccccttcaactttttgtccaagaaaacttttcgtgtttgcctgtagctgatgtgcagttgtttctgctcccaaatcaacagggtttaatgaaaaccctagaaagtagaaacccgtgggagagaaaagaaaaaagacaagttcacaaggtatgtttagtgtataaaaaaggagaaggactagaaagcctgagatacaaaggaaatgaagaaactaatcagtgagatagagataaagcttttttctgaatttttagcattattacctgatttagttaaccagctgcattaattttatgctcctgatttgtgcacaaattgaaatttttgctattggatttaggttccctctctaggagtttctcagttgtttgcactaagtaggatatagttgctaacttacttagatgaccttttatgaaatttgtaggtgatatatttatttcatttctggagcagatacagctgagcagcttaggtagactatgaagaaagtgtgtgtgtatatatacaccaactaaaatgttaaaggtaaatagcctaaaagtagcaatttttttttgaaaagcaacctgagttttcagtagagtgttattataaaccaagctttacccagagagaaattgactgaaaaacacgttttctgagatgttttagagtttgagctgtttctcagttgatggcatgagctatttcaggaacagaactatatagatctttagacttttattacttcttatttattttcttcagaatacttttacatttggtttgaggagagtcagaattcttatctggattcaccatgttcacatctgtgtgcacatgacagatttcagttctgctgtggttaacttatctgacttgtccaacaggttcctgggtggagctacccatgaacagcagcaatggcaatgataatggcaatgggaaaaatggggggctggaacacgtaccatcctcatcctccatccacaatggagacatggagaagattcttttggatgcacaacatgaatcaggacagagtagttccagaggcagttctcactgtgacaggtaagtgagacccatgttttggtggaattcaggaaacaggtgggttacagggctcattcactctaggaaaaatctgtttgcttaaatcttcacttagcaaaatatgcctcctgatatattgtagtataatatatattgcacagatatatattgtgtttatatgagacagctaattgacaggtgcttcagtgcccactgtttttccccagattgtcatttttcttacccagattatattgtttctagcagtttatcagtttaaaattcagtggcataaatgctaatttatagaattaatctgactttcccccattttcctttgtgtccctgtgttacagatcacagactgttcttgaattagttacctctgtatatatgtgtcttcccttctagatgttgacgttgcaaagggcaggggccatgtttaatttttattaccttcacagtaatggtgctggcacgtagtagacactcagtaaatgtttgattcataggaactgcaggttgcttcacgttatagcaatatttgcacagttggaagcaccaaccaaggtctgtaaagatagttttgaagtctcctctgctttctcaggggatgttttgtttcagacctcatttttctatatttgagctgaagaaactaattacatggattaaggactgcttatggtgaaagagtaagaatacaacgagatatgtgtgtggaatgaaaccaggtcattattttttagtataaacttttctgtttttttttttttttttcagaagggctagatattaaatgacatttaagaaattcttgtttcagtgacagctacactgttagcattatggggcactggatgaccttctgggtggttgttaactgatgttaaccatttagaaaatgcaaatgcacgggaagcagattaaggaaatgtaaacagtgactatttttaggaatgcagtatggatatgtttcttcttaacatttttgtattttgtaaaaattgtgtatattgcacatattattacttatcagaagaagtgaaaaaaaggagaaatgagttaaatcatgtccaacttcctgagtggcttatgatccactaatgttgccaaggcagcgggggactggtttgttggctctgtggcacactgtgcacccccgccacccccgtgtcatccctgacttgtccctgtgcttcttagagcctgggatggctcttgtcataagcggaaccagagcagatggctctcttctgaacagcttgcccttgattccagtagctacagcattagtctgtctttccgaatgaagatttatatttatattatggaacttgctgatgggtttctcaagttttctgcttgttatggcctgtcaacaaggctttcactctgcgttcaggtgtgtgggccttgatcattgataccatggtgtccatgagcctgttgttcacatggtgctgtcaatgagcagagaacagtcacctgcttacctgtctgttcatcttacttcatttatggtgcagttttacgtgtgactgaatatgccttcaccctcctatgatcatgtttaagtttaggttgccatgaggaggcatggcaaatgcttttgaacactttcgtacccctcatcttatgtctctccaggccctagattagtggtcatctttcagagaatggctagaactcgagtcttctgggatagcctactaacacgctttaccattgaggagtgtcttcaaaactcacatcatctgaattgccatgcgtctctatatgtgaaaagtaattggaaagtgtttcttgtagggggaaatgttttagggttgttgggtatcagtcctagagctgatttatgtatattttcaacttaaaaattattccatagaaatatttgtgttgccgcaggggttgttagctgggaaccccagtgtgttctgctttgcctttcaccctgtcacaggggttttcaccttgacggcacactagattcacccagaagcttttaaaaatggcagcacatggactgcatctcaagaacttctcattttggttgacaggggcagggtagagacgtcacaatattttaaaagctccccagccgattctaatatgtgccatgggtgaagctctaatgcattccaaattgttaggaggagtaaacagtttagagaagaggttggtaccagtgtgaagaagcatatagaagcagagcaatgcttccataggattcttgactttgtcaccctgactgccttgacctggtcacggctatgtaaggctgacccttaacttgatgtgtagctgtgaacccaacagttatgagcacaaagatagtaaactgaggccagtaggagtgcccagttcgggttgactcctgtgctagttcaagacaaaaatttcctaaatatatatgacgttggtttgatacagaaccagcttttctgttttcctgtccccatttaaaaatctcctatgtcaattatactagtctaaaagactcctaggcctaatctgtctgataaatttctgacgatcttatttctgagtcagtctcaccaacgtctctatacattaattaacattatatacatactcttgataactttaatagttaatatctattcttttcagcaagttaagccccaaatattttttatttctattttagattttgggggagggtttgtgtatgtagtgaaggatccccagtgactttcagtttttatacaagaaatcattaataaagctaagaaattaacttagcacattctgttcatctcttgtatcaagtgcagtttgtgatcatgttgtttttgtctaaaaacttatttgtaaatttttacagttctaagaatgtattttgtgcaatcataaaggttttatattaatatataagttatataattcactctgaaatatctcaaagcaaatatttctgaaataagtaaaatagtggttctcaaagtttttggtcattacatacctttacattcttaaaaatcattagggaccccaaaaaacttgtttgtgggtttatatattttgatatttactatattagaaattaaaactgagaaaatatatattcattcaaaaataatacattttaacataagtagcattttttagtgaaaatacctattttctataaaccctccaagttaataagaatagtggcattgttttacacatttacaaatctctaataccaagcttaatagaagacagctggttctcatctgtgtttgcattctaactgttgtgctatcacacatcatgtagcctttggaaaattccactatacacatgggagaatgagaatgaaaaaggcaaataaatcctactagtattgagaaaggaactgtaacctcaaagaccctctgaaagcgtctttgagaactaccttatgcactttgagaactactggtgaattatttaatgatgagggaactttgagaaaaagaactctgaagttcctgaatttgaagattattttacctttagtggacaaaagagtaaatataagagaatgtgacagtttgtgtctgtagatagtatttcctttgcaaatttatcattttgaaggatttcattactactgaaaaagtgcagaacattttgggagtaagaatgctcaatttcatttagccttttaatatcacataaatttttcttgtatagggttatgatatattctctgatttgctttttcaaagccatactgctgtaacttttaattttctaatttctagtagagactaagtcatttgacaaagtgagaattaaaactaatagctgaattccttctcttctagcccttcgccacaagaagatgggcagatcatgtttgatgtggaaatgcacaccagcagggaccatagctctcaggtgtgtcggggggattctgatttacagtaaacaattaagaaagatgtaaattctctaagtatattttgctaaaataaatgtgaagacttttaggaatagtttgaagctattattgagtttctgattttggaatttatttaggatgatatagttcttgtcgcactcctttacaactaaggattttgggccctgtcactctaaacgaattggaaaattcttgtccataataaatcatgccaatactccaggctagtttcttgagtgtataagtagaaaaagactgagatagatgctttaagaccacagaatagggaggagccaagatggctgaataggaacagctccggtctacagctcccagcatgagcgacgcagaagacgggtgatttctgcatttccatctgaggtaccgggttcatctcactagggagtgccagacagtgggcgcaggccagtgggtgcgcgcaccgtgcgcgagccgaagcagggcgaggcattgcctcacctgggaagcgcaaggggtcagggagttccctttccgagtcaaagaaaggggtgacggacgcacctggaaaatcgggtcactcccacccgaatattgtgcttttcagaccggcttaaaaaacggcgcaccacgagactatatcccacacctggctcggagggtcctatgcccacggaatctcgctgattgctagcacagcagtctgagatcaaactgcaaggcggcagcgaggctgggggaggggcgcccgccattgcccaggcttgcttaggtaaacagagcagccgggaagctcgaactgggtggagcccaccacagctcaaggaggcctgcctgcctctgtaggctccacctctgggggcagggcacagacaaacaaaaagacagcagtaacctctgcagacttaaatgtccctgtctgacagctttgaagagagcagtggttctcccagcacgcagctggagatctgagaacgggcagactgcctcctcaagtgggtccctgacccctgacccccgagcagcctaactgggaggcaccccccagcaggggcacactgacacctcacacggcagggtattccaacagacctgcagctgagggtcctgtctgttagaaggaaaactaacaaacagaaaggacatccacaccgaaaacccatctgtacatcaccatcatcaaagaccaaaagtagataaaaccacaaagatggggaaaaaacagaacagaaaaactggaaactctaaaacacagagcgcctctcctcctccaaaggaacgcagttcctcaccagcaacggaacaaagctggatggagaatgattttgacgagctgagagaagaaggcttcagacgatcaaattagagtgagctacgggaggacattcaaaccaaaggcaaagaagttgaaaactgaaaaaaatttagaagaatgtataactagaataaccaatacagagaagtgcttaaaggagctgatggagctgaaaaccaaggctcgagaactacgtgaagaatgcagaagcctcaggagccgatgcgatcaactggaagaaagggtatcagcaatggaagatgaaatgaatgaaatgaagcaagaagggaagtttagagaaaaaagaataaaaagaaatgagcaaagcctccaagaaatatgggactatgtgaaaagaccaaatctacgtctgattggtgtacctgaaagtgatgcggagaatggaaccaagttggaaaacactctgcaggatattatccaggagaacttccccaatctagcaaggcaggccaacgttcagattcaggaaatacagagaacgccacaaagatactcctcgagaagagcaactccaagacacataattgtcagattcaccaaagttgaaatgaaggaaaaaatgttaagggcagccagagagaaaggtcgggttaccctcaaagggaagcccatcagactaacagcggatctcttggcagaaaccctacaagccagaagagagtgggggccaatattcaacattcttaaagaaaagaattttcaacccagaatttcatatccagccaaactaagcttcataagtgaaggagaaataaaatactttacagacaagcaaatgctgaccgattttgtcaccaccaggcctgccctaaaagagctcctgaaggaagcgctaaacatggaaaggaacaaccggtaccagctgctgcaaaatcatgccaaaatgtaaagaccatcgagactaggaagaaactgcatcaactaacgagcaaaatcaccagctaacatcataatgacaggatcaaattcacacataacaatattaactttaaatgtaagtggactaaattctgcaattaaaagacacagactggcaaattggataaagagtcaagacccatcagtgtgctgtattcaggaaacccatctcacgtgcagagacacacataggctcaaaataaaaggatggaggaagatctaccaagcaaatggaaaacaaaaaaaggcaggggttgcaatcctagtctctgataaaacagactttaaaccaacaaagatcaaaagagacaaagaaggccattacataatggtaaagggatcaattcaacaagaggagctaactatcctaaatatatatgcacccaatacaggagcacccagattcataaagcaagtcctgagtgacctacaaagagacttagactcccacacattaataatgggagactttaacaccccactgtcaatattagacagatcaacaagacagaaagtcaacaaggatacccaggaattgaactcagctctgcaccaagcagacctaatagacgtctacagaactctccaccccaaatcaacagaatatacatttttttcagcaccacaccacacctattccaaaattgaccacatagttggaagtaaagctctcctcagcaaatgtaaaagaacagaaattataacaaactatctctcagaccacagtgcaatcaaactagaactcaggattaagaatctcactcaaagccgctcaactacatggaaactgaacaacctgctcctgaatgactactgggtacataacgaaatgaaggcagaaataaagatgttctttgaaaccaacgagaacaaagacacaacataccagaatctctgggacgcattcaaagcagtgtgtagagggaaatttatagcactaaatgcccacaagagaaagcaggaaagatccaaaattgacaccctagcatcacaattaaaagaactagaaaagcaagagcaaacacattcaaaagctagcagaaggcaagaaataactaaaatcagagcagaactgaaggaaatagagacacaaaaaacccttcaaaaaatcaatgaatccaggagctggttttttgaaaggatcaacaaaattgatagaccgctagcaagactaataaagaaaaaaagagagaagaatcaaatagacaaaaaatgatactacaaacacctctacgcaaataaactagaaaatctggaagaaatggatacattcctcgacacatacactctcccaagactaaaccaggaagaagttgaatctctgaatagaccaataacaggagctgaaattgtggcaataatcaatagtttaccaaccaagaagagtccaggaccagatggattcacagccgaattctaccagaggtacaaggaggaactggtaccattccttctgaaactattccaatcaatagaaaaagagggaatcctctgtaactcattttatgaggccagcatcattctgataccaaagccgggcagagacacaaccaaaaaagagaattttagaccaatatccttgatgaacattgatgcaaaaatcctcaataaaatactggcaaaccgaatccagcagcacatcaaaaagcttatccaccatgatcaagtgggcttcatccctgggatgcaaggctggttcaatatacacaaatcaataaatgtaatccagcatataaacagagccaaagacaaaaaccacatgattatctcaatagatgcagaaaaagcctttgacaaaattcaacaacccttcatgctaaaaactctcaataaattaggtattgatgggacgtatttcaaaataataagagctatctatgacaaacccacagccaatatcatactgaatgggcaaaaactggaagcattccctttgaaaactggcacaagacagggatgccctctctcaccgctcctattcaacatagtgttggaagttctggccagggcaatcaggcaggagaaggaaataaagggtattcaattaggaaaagaggaagtcaaattgtccctgtttgcagatgacatgattgtttatctagaaaaccccattttctcagcccaaaatctccttaagctgataagcaacttcagcaaagtctcaggatacaaaatcaatgtacaaaaatcacaagcattcctatacaccaacaagagacaaacagccaaatcatgagtgaactcccattcacaattgcttcaaagagaataaaatacctaggaatccaacttacaagggatgtgaaggacctcttcaaggagaactacaaaccactgctcaaggaaataaaagaggatacaaagaaatggaagaacattccatgctcatgggtaggaagaatcaatatcgtgaaaatggccatactgcccaagataatttacagattcagtgccatccccatcaagctaccaatgactttcttcacagaattggaaaaaactactttaaagttcatatggaaccaaaaaagagcctgcatcgccaagtcaatcctaagccaaaagaacaaagctggaggcatcacactacctgacttcaaactataccacaaggctacagtaaccaaaacagcatggtactggtaccaaaacatagatatagatcaatggaacagaacagagccctcagaaataacgccgcttacctacaactatctgatctttgacaaacctgagaaaaacaagcaatggggaaaggattccctatttaataaatggtgctgggaaaactggctagccatatgtagaaagctgaaactggatcccttccttacaccttatacaaaaatcaattcaagatggattaaagatttaaacgttagacctaaaaccataaaaaccctagaagaaaacctaggcattaccattcaggacataggcgtgggcaaggacttcatgtccaaaacaccaaaagcaatggcaaccaaagccaaaattgacaaatgggatctaattaaactaaagagcttctacacagcaaaagaaactaccatcagagtgaacaggcaacctacaacatgggagaaaattttcgcaacctactcatctgacaaagggctaatatccagaatctacaatgaactcaaacaaatttacaagaaaaaaacaaacaaccccatcaaaaagtgggcgaaggacatgaacagacacttctcaaaagaagacagttatgcagccaaaaaacacatgaaaaaatgctcatcatcactggccatcagagaaatgcaaatcaaaaccactatgagatgtcatctcacaccagttagaatggcaatcattaaaaagtcaggaaacaacaggtgctggagaggatgtggagaaataggaacacttttacactgttggtgggactgtaaactagttcaaccattgtggaagtcagtgtggcgattcctcaggtatctagaactagaaataccatttgacccagccatcccattactgggtatatacccaaatgactataaatcatgctgctataaagacacatgcacacgtatgtttattgcggcattattcacgatagcaaagacttggaaccaacccaaatgtccaacaatgatagactggattaagaaaatgtggcacatatacaccatggaatactatgcagccataaaaaatgatgagttcatgtcctttgtagggacatggatgaaattggaaaccatcattctcagtaaactatcgcaagaacaaaaaaccaaacaccgcatattctcactcataggtgggaattgaacaatgagatcacatggacacaggaaggggaatatcacactctggggactgtggtggggagcggggaggggggaaggatagcattgggagatatacctaatgctagatgacgagttagtgggtgcagcacaccagcatggcacatgtatacatatgtaactaacctgcacaatgtgcacatgtaccctaaaacttaaattaaaaaaaaaaaacaaaaaaaaaaacctaccagtggaggtacaaaataaaaaaaaaaaaaaagaccacagaataaatgaagatgaaggttgtattagaactagacatgaagacttttttttgcatctgaaatcaaagcagtggcttttgagataaattttaaatttatctaaattatgcaggattccttcaagataaatattgtttactaggagttgacaatgttggaaacatagatggatatagtattaaaatcttacaaatgtttgtgttataagacttaaaatatggtaagtatataactgtggctaatgatttagaatactcatagccagcctttaactttattgatatgtaagatcacctaaaagtgtcattagagtacaaattcttgaggacgggaaccattatctttttctcctgtatttagggtgcttgaaaaatgtttaatgaacctttgaatgagtcgcaacaaaaaccttgttttgtcgggttctcactattctgtgtcctgggcactagaaatattttgtgtgtcttagatccacccagtattctttctgtttccaaaggccacagaattcctctatactttactatgctctatttttgcttttctctgaaatgtcgaaaatctttggattcaacacaaatttattttatgatgatgagctttatactgtagagaagctcacaatagcaggctgtcgtatataagatgatctgactggagcatttgaattgctggcttatgtatgtcagtttggccacatgcagtaagctatagctgatgtagaagaaagcttacaaagtctccatagcagaaagtgtaccacggaatccaggagagaaatcgaattctttgccgtggtctttcctgaggaggatttcttcaatctatatcaccttttatacagaaagctttaagtttagattagcattttccaaaatgtgttttcaagaacatttgttcaaaggtcaaataaatggaaggtaatgcagccccaggttcccccacactctcaccttagtagtcgcatgagtaattctgaccagttcctgcagtaaagaaattatagtttaagctggacatggtggcacttgcctgtagtctcagctacttgggaggtggaggtgggaggatcccttgagccccacaagtttttgagtccagcctgggcaacatagcaagactctctgtctctaaaaaaaagaaaaaaagaaatgggtttaattaaaccaaatgtttcccaagcttatttgaccttagactttcttcctcttctctgcatacgtttttcccttaagaacttaataactccgtggagcactgtggtaagtgctttcctggctcatggagttgcagatgtgcaatcaggcttaactcaatattgaatgtacatggaattctagagttgaatgcatctaccctggaattccaaaggaatttttgaaattcaggaaagaaaatgtcaggtttttggcctttggtaggtttgccagtgttgatcccttctcaggaccaaatccctaaaagagcataggctatcatcaagaggaggtacttactttatgttgacaatcagatcggtcagtttcaacaaagggaagagtttggaaagacagcctaacccctgtgagagataacagttgagtaggacttaataagggagctgtcagcaggtatagtttaaactttcaaaaacctttgacattgcctttttttaatggaagaaacaataatttaaaaattaatttctttaggatttgggaaaattgattttcttcctgaataagaagaaagtttagggttaggaaacttaaaaaagcagttaaaggactgttattgtacttgatcttatagaatgtttttatatgtgtttataaggactatatataattttcaagcttttctaagatgaggaagtaaagtcactaacattaactagatatgttctaggtactcagtttctttttttttttttttggagacagcgtctcagggtcttgctttgtcacccaggctggagtgtagtggtgcagttgtagctcaccacagacttcgattcccggctcaagcaatctttctgcctcagtctccctagtagctgggactacaggctcacactgccacgcctggctacttttttattttttttttgtatagacagagtctcgctatattgcccaggccgttttcaaactcctggcctcaaatgatcctcccatgtcggcctcccaaagtgctggaattacagacatgagttactactcccacctctcttttaatgttctcaatccagtgaaagcaatgatattatccccatggaccagtggaaaaagtgaggctttgtactaattacttatctaagatcacaaagcaagtcactgttagagccaggattcaaagcaggtctgagtctgtggcccttgttctttctactgaactaagtaaatgaattcgattgataacaggagagctcacaaagccatgagaatgaactgaaaaatgtctgctgagttatggtatggggaatctgcctaaggcagtgtgcacttaggaaaaagaccatgaaactgcttttcggatgatcatcctcaagagtctcagttttgtatcagaaaacagactgtagattgtttcttcacttgatcttagccaaaagtccgagaagcgatatagattatttattgaagacatttttgcattgtgtttctgggaccaaaaatgccagcacaatgttgagtgttactgaaaaatgatccaaacagaaaatatcctccatttcctgtcttgtaaaactgtgatttttatctgtacatgaatcatggtatacagcttaatatccatatttagaggacagagtgaccttgaggtaaaccagagaaggaaaacttaagtgatcagaaaacaaagaactccatgtgagagaacaggctagaacgatcagaatcttctttgtttttgttttttgtttttgagatggacctcactctgtcaccaggctggagtgcagtggcatcggctcactgcaacctctgtttccaggtggttctgctgcctcagctgcccaagaagctgggattacaggtgtgcaccacaacgcctggctaatttttgtatttttagtagagacagggtttcgccgtgctggccaggctggtctcaaactcctaacctcaagtgatccgtccacctcggcctccctaagtgctgggattacaggcatgagccatggtgcccagccagaatcttctttgaatagatgtaggtatagagagaggattattgattttaaaagcacaaatcttacgtaattagattaagtacatttttaccatattctggaattctaagaattggaaggcagtttaaaacctgaaagtggcaaatttaagattaataaaaggaagcacagagtggtagtgaatgaggaaagcttaccactcttattcttaaagtattgtaagttgggaaacttatggagttcttttttgttttgttttctttttaaaacacttgtccagagataactttgcttcattcaactgagaaaattccatcctcatgaaaaaaaaaattagagcgtgaaatcttactgcgtttcattctgtcagaaattatgaaatattaacttgttaaatctttgagcaggtttaaagaaagatctgtgaggccaaagcaggaaactaaacagaagcgacctgcagtgtgttgagtatagtcagatattgtgtgtacaggaactgatgtgcaagtaaattgtaacagtttattgtttttgatttgggatgatttcagtgttactccaaagagccaactcatgattctgagtaatctcaatagccaatggaaggagcttaatcctaaatgctacattgtgtcattcagtggaatttgccaagttcagcagaactagataagattggtactaacaagagcagcagaacgcacaggggttttactttgccctgtctgaagctccttcctggggtagctgtttcacagagaactagacctgtcaagagtcatgtgaatatgtcagactctgcatttcttagctacctactgaaaagaatgacagctttggtcattcttttgagtgaatcctagtcaaacaaaataaaatgtcaaaatgcttcttagttttgagacccctgggtttgggatcatagcatgacatcccttaaaactgactatgaccaggcacggtggctcacgcctgtaatctcaacactttgggaggctgaggcgtgtagatcacttgaggtcaggagttcgagaccagcctggccaacatggtgaaaccccgtctctacgaaaaatataaaaatttgccaggtgtagtgccaggcgcctgtaatcccagctactctggaagctgaggcaggagaattgctagaacccaggaggcagaggttgcagtgagccaaggtcgcgccactgcactccagcctgggtgacagagcgagactccgtctcaaaaagaaaactgaataaataatactgaataaataaatatcatttttaggactttttcattccttttggttctattaaaaggggagctattggaaatgttaattgttcttggcctgaaactttaggttataataagcaatttttaaaagtcacattttttattttatttgatatgacacatgttaaattctgactcaacttattatagattattcccaaaaacttttggctaacatagtttcgaaaccttggaaaatgtttgtatagcaatttgtcctaaaaatataatctccttccagagagtaaaccctggtgcttaacagtagggcctctctatacagtattcctgggtttgaatactggccctgctatgtactggttgtggaaccttaggcaagttatttaatctatgtctcagtctcctcatctgtaaaatgggattttaataattatttttatagggttatttgttgcaaggtgaaagttaatgcatgtggctgggtgcagtgtctcacacctgtaatcccagcactttgggaggctgaggcagggaagatcccttgagcccgggagttcaagaccaggctgggcaacatagtgaaacactgtctctttaaagaaatacaaaaattagctgggcgtggtggcacacacctgtagtcccagctacttgggaggttgaggtgggagaattaattgagcccaggagttcgaggctgcagtaagctgtgattgcactctggcctgggtgacacaggagaccctgtctccagaaaaaaaaaaaaaatgcatgtaacatgcttggaataatatttgcccctttaagtgctcaataaatactattatttatttcctcatcacatctctcacttatttttgttttacttctcatcattttatttttagcatatccttttatttccttttatttttttaattatgaaatttttttttttcttttttttgttgagatggaatctcactctatcacccaggctggagtgtagtggctggatctcggctccacctcccaggctcaagcaacctccacctcccaggctcaagcgattcttctgcctcagcctctcaagtagctgggattacaggtgcccgccaccatgcccggctaatttttttttgttttgttttgttttgttttttgaggcggagtctcgctctttcccccaggcaggagtgtagtggcgcgatctctgctcactgcaagctccgcctcctgggttcacgccattctcctgcctcagcctcccgagtagctgggactacaggtgcccgccatcacgcccagctaatttttttgtatttttagtagacacagggtttcactgtgttagccaggatggtctcgatctcctgaccttgtgatccgctcacctcggcctcccaaagtgctgggattacaggcgtgagccaccgcacccagcgtgtaagttttgtgtttttttttagtaaagacggggttttaccatgttggccaggctggtctccagcttctgacctcaagtgatccgcctgcctcagcctcccaaagtgctgggattataggcatgagccactgcacccggcctaattacgaaaattttaagtgcatacaagagagaataatataatggacctccatgtaagtattgcccagatttaactcttatcgaggtttttcatacttcccttagcattacatcccaaagtacagtcttatgcagttcctgtgctgtgcttagatatcccaacagtgaagctcactcaggttgttctgaagatattacatactctgatcttacattatttttcagcattttttagaaaagcaacatgtttgttatctaaaatttctgagacacaaccttatgagtttggtatcttttctgtctagatttttctttgtattaggaggaattggtcttcctttttttcttaaagtttgaattcttctttacagtcagaagaagaagttgtagaaggagagaaggaagtcgaggctttgaagaaaagtgcggactgggtatcagactggtccagtagacccgaaaacattccacccaagtgagttctcacatgtttcttgtcagtggacacagttgatctgcgcacgcttacaggcaatgggcctggtaatccccacgatattttcagcaaatgacatctgcctctgaatttctttctcagggagttccacttcagacaccctaaacgttctgtgtctttaagcatgaggaaaagtggagccatgaagaaagggggtattttctccgcagaatttctgaaggtgttcattccatctctcttcctttctcatgttttggctttggggctagggtaagtaccggtcaactcctgaagttttttccattcattttatcctcttattttcagattgaagaaatgtatgtgaaagcagtttttattgctttactttcaatgttttagtgcaaataaggtgaacttaaaaaagtgggtgcacaattgttctacaaataagcatttttaataatagtagagtgtgttttcttatttgaaaataagatgtttggcctggtgtggtggctcatgccagtaatcccagcactttgggaggccaagatgggtggatgacctgaggccaggagttcaagaccagcctggccaacatggtgaaacccggtctctactaaaaatacaaaaattagctggccatggtggtacatgcctgtggtcccagctacttgggaggctgaggcaggagaatcgcttgaacatgggaggcggaaattgcagtgagccgagatcatgccactgcactccagcctgggggatagagtgagactccatctcggaaaaaaaaaaaaaaaaaagaagatgttcataataatcccctaaatgatcaaatgtaagcggactcctctgtgattgatttttctttttgggttttgttgtgtaatatttaatcttgagtaatttatgaactaaactaatctttagcatgtacattttgtggtcagtgcaaatacctttttttcatatgggaaaatacatgattacattgaatagttttttttaatgaaactggtaggttgattggtgctaattttttccttttttaactttgtagtattttcatttattttgctaaaatcaacctcatatttacgtgtaattcattagtttcttagccacatcttttaaataaattgctttttttccttgatttaaacaattgaggaattacacttctgaaagattttaggagttaaacagtagctgttaatttttttcaagacgtatgttgtgctctaagcatgcccagtgggtcattttcagtataagatatgcagaagatggggtcatcctttttcttccctttaaggagctcagcatattggagagagattcttagtcacgacctcagaaacttgcatacagctttccacacacccgtcttgtctctcttgggtgcttgatctgcttttgtgagggcaaggacagtaatcaacaaacagcaacctagaaggggtttgtgcagaaggggactgtgtgactgttgcgtgggggttgatgtggggcaggtgtaggagtttaatacattgctgcctatacagcagttcattgcccttaagcgattggtgtctataccttgccgtctctctttcagtcatcttcagattgtttgtcttggctgtaagtataactattgctatagatgaatgtaaaaagagtgtttaaaaagttcgttgctttaattgcactggaggtgaagctagttacatactttccttaacttcccttctgcttttgctgttgaagaggccaaatactttcttggcatgaaaaagtattataaggcccctaatccttaggagttattagtaagagctgtctttaaagcactggcagcttttaaggttttttttttcttttgtcctacatagagcaccagaataatttcacatattactatatttttgtgtctgaaatgtcagtagaaccttctgtccaccaaagaggaacatcttgaaggagttgggctgctttatttactctgtggagggatctgttctctctggctttactttgtctaatcactacccctttgctgtcgagccccgatatttaatgagtaaacaaactcatataaaaccagtttggccgggctggtgactggttttaagaaagtcagtgatgatttcacggtgtttggggagcggtacccacaaacctttagagccttttacaaagactgaagagttttaagtagagttcaacctgtggacaagctggtatagaactgttgaaacaggtgaaacatgatgcttctgcttcctttcagcatctatattggaaagcgactgagcacaccctctgccagcacctactgagggaaaggaaaagcccctggaaatgcgtgtgacctgtgaagtggtgtattgtcacagtagcttatttgaacttgagaccattgtaagcatgacccaacctaccaccctgtttttacatatccaattccagtaactctcaaattcaatattttattcaaactctgttgaggcattttactaaccttataccctttttggcctgaagacattttagaatttcctaacagagtttactgttgtttagaaatttgcaagggcttcttttccgcaaatgccaccagcagattataattttgtcagcaatgctattatctctaattagtgccaccagactagacctgtatcattcatggtataaattttactcttgcaacataactaccatctctctcttaaaacgagatcaggttagcaaatgatgtaaaagaagctttattgtctagttgttttttttcccccaagacaaaggcaagtttccctaagtttgagttgatagttattaaaaagaaaacaaaacaaaaaaaaaaggcaaggcacaacaaaaaaatatcctgggcaataaaaaaaatattttaaaccagctttggagccacttttttgtctaagcctcctaatagcgtcttttaatttataggaggcaaactgtataaatgataggtatgaaatagaataagaagtaaaatacatcagcagattttcatactagtatgttgtaatgctgtcttttctatggtgtagaatctttctttctgataaggaacgtctcaggcttagaaatatatgaaattgctttttgagatttttgcgtgtgtgtttgatattttttacgataattagctgcatgtgaatttttcatgaccttctttacattttttattttttatttctttatttttttttctctaagaagaggctttggaatgagttccaatttgtgatgttaatacaggcttcttgttttaggaagcatcacctatactctgaagcctttaaactctgaagagaattgtttcagagttattccaagcacttgtgcaacttggaaaaacagacttgggttgtgggaacagttgacagcgttctgaaaagatgccatttgtttccttctgatctctcactgaataatgtttactgtacagtcttcccaaggtgattcctgcgactgcaggcactggtcattttctcatgtagctgtcttttcagttatggtaaactcttaaagttcagaacactcaacagattccttcagtgatatacttgttcgttcatttctaaaatgtgaagctttaggaccaaattgttagaaagcatcaggatgaccagttatctcgagtagattttcttggatttcagaacatctagcatgactctgaaggataccacatgttttatatataaataattactgtttatgatatagacattgatattgactatttagagaaccgttgttaattttaaaactagcaatctataaagtgcaccaggtcaacttgaataaaaacactatgacagacaggtttgccagtttgcagaaactaactcttttctcacatcaacatttgtaaaattgatgtgttatagtggaaaataacatatagattaaacaaaatttttatcttttttcaagaatatagctggctatctttaagaaagatgatatatcctagttttgaaagtaattttcttttttctttctagcatttgatgtctaaataattttggacatctttttcctagaccatgtttctgtcttactcttaaacctggtaacacttgatttgccttctataacctatttatttcaagtgttcatatttgaatttctttgggaagaaagtaaatctgatggctcactgatttttgaaaagcctgaataaaattggaaagactggaaagttaggagaactgactagctaaactgctacagtatgcaatttctattacaattggtattacaggggggaaaagtaaaattacactttacctgaaagtgacttcttacagctagtgcattgtgctctttccaagttcagcagcagttctatcagtggtgccactgaaactgggtatatttatgatttctttcagcgttaaaaagaaacatagtgttgccctttttcttaaagcatcagtgaaattatggaaaattacttaaaacgtgaatacatcatcacagtagaatttattatgagagcatgtagtatgtatctgtagccctaacacatgggatgaacgttttactgctacacccagatttgtgttgaacgaaaacattgtggtttggaaaggagaattcaacaattaatagttgaaattgtgaggttaatgtttaaaaagctttacacctgtttacaatttggggacaaaaaggcaggcttcatttttcatatgtttgatgaaaactggctcaagatgtttgtaaatagaatcaagagcaaaactgcacaaacttgcacattggaaagtgcaacaagttcccgtgattgcagtaaaaatatttactattctaaaaaaatgagaattgaagacttagccagtcagataagttttttcatgaacccgttgtggaaattattggaattaactgagccaaagtgattatgcattcttcatctattttagttagcactttgtatcgttatatacagtttacaatacatgtataacttgtagctataaacattttgtgccattaaagctctcacaaaactttt

SEQ ID NO: 8 - RNA, 3505 nt, Homo sapiens
cgucaggggcaggggagggacggcgcaggcgcagaaaagggggcggcggacucggcuuguuguguugcugccugagugccggagacgguccugcugcugccgcaguccugccagcuguccgacaaugucgucccaccuagucgagccgccgccgccccugcacaacaacaacaacaacugcgaggaaaaugagcagucucugcccccgccggccggccucaacaguuccuggguggagcuacccaugaacagcagcaauggcaaugauaauggcaaugggaaaaauggggggcuggaacacguaccauccucauccuccauccacaauggagacauggagaagauucuuuuggaugcacaacaugaaucaggacagaguaguuccagaggcaguucucacugugacagcccuucgccacaagaagaugggcagaucauguuugauguggaaaugcacaccagcagggaccauagcucucagucagaagaagaaguuguagaaggagagaaggaagucgaggcuuugaagaaaagugcggacuggguaucagacugguccaguagacccgaaaacauuccacccaaggaguuccacuucagacacccuaaacguucugugucuuuaagcaugaggaaaaguggagccaugaagaaaggggguauuuucuccgcagaauuucugaagguguucauuccaucucucuuccuuucucauguuuuggcuuuggggcuaggcaucuauauuggaaagcgacugagcacacccucugccagcaccuacugagggaaaggaaaagccccuggaaaugcgugugaccugugaagugguguauugucacaguagcuuauuugaacuugagaccauuguaagcaugacccaaccuaccacccuguuuuuacauauccaauuccaguaacucucaaauucaauauuuuauucaaacucuguugaggcauuuuacuaaccuuauacccuuuuuggccugaagacauuuuagaauuuccuaacagaguuuacuguuguuuagaaauuugcaagggcuucuuuuccgcaaaugccaccagcagauuauaauuuugucagcaaugcuauuaucucuaauuagugccaccagacuagaccuguaucauucaugguauaaauuuuacucuugcaacauaacuaccaucucucucuuaaaacgagaucagguuagcaaaugauguaaaagaagcuuuauugucuaguuguuuuuuuucccccaagacaaaggcaaguuucccuaaguuugaguugauaguuauuaaaaagaaaacaaaacaaaaaaaaaaggcaaggcacaacaaaaaaauauccugggcaauaaaaaaaauauuuuaaaccagcuuuggagccacuuuuuugucuaagccuccuaauagcgucuuuuaauuuauaggaggcaaacuguauaaaugauagguaugaaauagaauaagaaguaaaauacaucagcagauuuucauacuaguauguuguaaugcugucuuuucuaugguguagaaucuuucuuucugauaaggaacgucucaggcuuagaaauauaugaaauugcuuuuugagauuuuugcguguguguuugauauuuuuuacgauaauuagcugcaugugaauuuuucaugaccuucuuuacauuuuuuauuuuuuauuucuuuauuuuuuuuucucuaagaagaggcuuuggaaugaguuccaauuugugauguuaauacaggcuucuuguuuuaggaagcaucaccuauacucugaagccuuuaaacucugaagagaauuguuucagaguuauuccaagcacuugugcaacuuggaaaaacagacuuggguugugggaacaguugacagcguucugaaaagaugccauuuguuuccuucugaucucucacugaauaauguuuacuguacagucuucccaaggugauuccugcgacugcaggcacuggucauuuucucauguagcugucuuuucaguuaugguaaacucuuaaaguucagaacacucaacagauuccuucagugauauacuuguucguucauuucuaaaaugugaagcuuuaggaccaaauuguuagaaagcaucaggaugaccaguuaucucgaguagauuuucuuggauuucagaacaucuagcaugacucugaaggauaccacauguuuuauauauaaauaauuacuguuuaugauauagacauugauauugacuauuuagagaaccguuguuaauuuuaaaacuagcaaucuauaaagugcaccaggucaacuugaauaaaaacacuaugacagacagguuugccaguuugcagaaacuaacucuuuucucacaucaacauuuguaaaauugauguguuauaguggaaaauaacauauagauuaaacaaaauuuuuaucuuuuuucaagaauauagcuggcuaucuuuaagaaagaugauauauccuaguuuugaaaguaauuuucuuuuuucuuucuagcauuugaugucuaaauaauuuuggacaucuuuuuccuagaccauguuucugucuuacucuuaaaccugguaacacuugauuugccuucuauaaccuauuuauuucaaguguucauauuugaauuucuuugggaagaaaguaaaucugauggcucacugauuuuugaaaagccugaauaaaauuggaaagacuggaaaguuaggagaacugacuagcuaaacugcuacaguaugcaauuucuauuacaauugguauuacaggggggaaaaguaaaauuacacuuuaccugaaagugacuucuuacagcuagugcauugugcucuuuccaaguucagcagcaguucuaucaguggugccacugaaacuggguauauuuaugauuucuuucagcguuaaaaagaaacauaguguugcccuuuuucuuaaagcaucagugaaauuauggaaaauuacuuaaaacgugaauacaucaucacaguagaauuuauuaugagagcauguaguauguaucuguagcccuaacacaugggaugaacguuuuacugcuacacccagauuuguguugaacgaaaacauugugguuuggaaaggagaauucaacaauuaauaguugaaauugugagguuaauguuuaaaaagcuuuacaccuguuuacaauuuggggacaaaaaggcaggcuucauuuuucauauguuugaugaaaacuggcucaagauguuuguaaauagaaucaagagcaaaacugcacaaacuugcacauuggaaagugcaacaaguucccgugauugcaguaaaaauauuuacuauucuaaaaaaaugagaauugaagacuuagccagucagauaaguuuuuucaugaacccguuguggaaauuauuggaauuaacugagccaaagugauuaugcauucuucaucuauuuuaguuagcacuuuguaucguuauauacaguuuacaauacauguauaacuuguagcuauaaacauuuugugccauuaaagcucucacaaaacuuuaaaaa

SEQ ID NO: 9 - protein, 219 aa, Homo sapiens
MSSHLVEPPPPLHNNNNNCEENEQSLPPPAGLNSSWVELPMNSSNGNDNGNGKNGGLEHVPSSSSIHNGDMEKILLDAQHESGQSSSRGSSHCDSPSPQEDGQIMFDVEMHTSRDHSSQSEEEVVEGEKEVEALKKSADWVSDWSSRPENIPPKEFHFRHPKRSVSLSMRKSGAMKKGGIFSAEFLKVFIPSLFLSHVLALGLGIYIGKRLSTPSASTY

SEQ ID NO: 10 - DNA, 43574 bp, Homo sapiens
cccgagcgccggccgggccatgacccccgctgctctgtcttgcaggctcgtcgccgcggccccccgagcccgaccgccgccgccaccaccaccagcgcccgggcgggcctcgcgcgcctcgggcgcggctccgcagtgagcccaccaagaaggaagcggtgagtgccccgcgcctcgtgcccgccgccccttccccgggacgcccgccttccccgagcaacgcggccccggccgggcggcgtccacgcctcgcaagctctagccgctgcaggggcgcggcccgggggtcggtgggagacccacgcgggcccgggcgtccccccaacttcttgcagactttgctgcggagacacgggctttgggaaacttggcccggctctggccgcgctgcaacttgcacggcggtgggggtgtgaccccgcgcggaagcctctggccccccactcaccacaggccaccccgcgccgtcacgagttccttgggaatggaccagaacgccattcctgagagctggaaggcagcccggcggggggcgggggcaggaggcctcccgaggaaccatttccactctatcgagtatttccaaatctattatttatgaactgcctcacttaggggcccccctgcgctcccagggcatcaaagcaggtttgcaaccgcgaagggcgacccgtgtggacgcacgcgctccttctcctggctggctgcgctcgagcggaactaggggaggtctcagtaaaaaggggcacccgcagctccccccagggataggcggagggcggggtctgagggcggctgggacttctctcagaccgcctccggctgcggggcccagatggaatcaagggaaaatctgtgcaggctcgacaggctttggagcccggaggaagagggaggaagggaaggctgcgaggcaaaggcacttgtgaggtagtgcggttctcggggaacgaacgcctcaatgtacaggttaggaaactgaggctctgagagggataccctgagtcacaggctctggcgtttcctgcctagaccccacccatccaacgctgtggggaggcccctgtcctgggctgggttaactccaaaaagcaccctcacctgtgcaggccacgccctccttgggttctgcgcccccaccgctggggacccggtcctgtggatgggaggaggccgtgtatttatggaaacacttaatccctcaccagccccaaggaggctgaaagctcaccacctaatctcgtctccctggaagcgccttcccatgccggtggggtgcaccccagacccacgtagagtgtattttcccagcccaaggtgcaggtcacctctggagacttgaaatgggagcgtgccgtcagtggacactgaagaagagcgcactgatagttcatgcttacggagcactcctcatgcaccagaccctgcgttttctgttttaatcccctgaccaactctccaaccaaatactgtcagccccattttaaagatgaggaaacagggccaggcacagtggctcacgcctgtggctgcaatactttgggatgccaaagcaggaggagtgcttgaggccaggagttcgagaccagcctgggcaacacagtgagtccccccagctactaaaaattttttaatgagctgggtgtggtgcatacctgtagtcccagctacttaggaggctgagacgggaggtttccttgagcccaagaagttgaggctacagtgagctatgatcacgccactgcattccagcctgggcaacagagggagaccctgtctcttaaaaaaataataataaattaaaaaataaaaatgaggaaacagaagcttgtaaaggcaaagtcactgacacaaggttacatggctggaaaatggcaaggccaggcctggaaccctgagccgtggtactgaattgctcttacctgcagtggaagccaggctaggcctctgggcctgctaagtataatcccccatcattaaaaagattagtaagtgatgatggggcccaggcacagtggctcacacctgtgatcccagtgctttgggagggtgaggcacgagcatcacctgaggccaggagtttgagaccaacctgagcaacatagtgagactcctttctctaaaaaaaaataaaataaaaaaaaaaaaaaaaaaaaaatcaaagcctcccaatcatctgaatggaccactccccttggctaagggcattccagagttaacctgcaaagctagttcaggccatgatgagaagtggggtcagacatgcctcattatactctcttgccttttgaaattgagaccccgcagaccagcattaacatcagtgcagaccttcagactaataggacagtccctttaagtctgataagaaacatgtacaatctgttctctctcaagccaaactccttatcgtaacccagacattcctttctatggattccaggtctttagataataactcttttgggtttttttgttgttttttcttgagacagtcttgctctgtcacccaggctggagtgcagtggcgtgatctcggctcactgcaacctccgcctcccaggctcaagtgattctcctgcctcagcatcctgagtagctgggattacaggtgcgtgccaccatgcccggctaatttttgtatttttagtagagatggggtttcgccctgttggtcaggctggcctcaaactcctgacctcgtgatccactcacctcagcctcccaaattgctggaattacaggcgtgagccactgcacccagcccagataataactctctcaaccatttgccaatcagaaaatttttgaatcctcctatgacccaaaagccatgtctccccatcccacgtacttcccccttcagttgtcccacctttccagatgaaaccaatgtatgtatgtgtatatatatatatatacacatatatatatatacacacacatatatatatacacacacacatatatatatatgtatatatatatatatttttttgagacggagtctcgctctgtcacccaggctggagtgcagtggtgcaataccagctcactgcaacctctacctcctaggttcaagcaattctctacctcaacctcctgagtagctgggattacaggcacctgtgccacacctggctaatttttttgtatttttagtagagatggggtttcaccaagttggccaggctggtcttgaactgctgaccttgtgatccacctgcctgagcctcccaaagtgctgggattacaggcatgagtccttgcgcccagctggaaccaatgtatatcttgtatgtactgattgataccttgtgtcttcctaatgtataaaaccaagctgtagaccaactaccttgggcacatattctctgggtctcctgaggccattggtcactcacatttgactcagaataaatctcttcaaatattttacagtttgatactttttgtgggcaagatgatatgcccattgtaataagtgtacatcaaaagtgtgcaccaggtcaagaaagagaccttcagccccccaggacacccccagaaatcccttcatgctcctcccagccatggtttccctatgggtagccgttaacctgacttcaaatagcagaccccttttatttattttgagatggggtctctctgttgcccaggctggagtgcagtggcatgatcatggctcactgcagcctcaacctcctgggctcaggtgatcctcccaactcagccccccaagtagttgggaccacaggtgtgtgccaccatacccagctaatttttgtatttttctgtggagacaggatttcaccatattgctctggctggtctcaaagccctcttattttttgataaatgtttttattgatgtataatgtacagaaaggtgctcaaatcctaaaggtgttcagctctattatttcacggtggcccagagtcggcaatgggcaagtattttgctgtgagtcacacggctcatccgtgggaggccaagcaggtggggatttcggtgggcctcctgcctccaccccatcctgtttcgcttcctgctggtgaaggcttcctgtgggccaggtggaggtcctggccactcagagagggactcactgtccccgcaggaccgtggctaagctgaagaccaggatggaagcacatgaatgcttgcagtatcgcttcccaacccagttcctttggctggagttgtaggaattctaatcctgctgcagaaagaaagtggctttcctaaagaaggaagaaaagcaccatgtgtgtcgtgagcctgctgggagccccgcttgcccgcactctcttccctgcttgcagcatgaccaggcccagagagctgaaggggcttaccaagcctcagagaccaccctgccccactgggattggagcccactcacctggcaaacagtcacattcttcagctgtgactcttcttcagccctgccctcttctgggtcctcctcccaggaggtctttgttaggcaagcagggcaaggtgccaccgtgactcaggacctccatggggttactctgatttcatctgggaggtggctctgcaggaaccagttcattcactttccctgtctagttctccaggtccccatctgggacagccagacgttagaaatcagatgaccttgaatagagtggtcagattcagcagataaacacaaggataactaagttatccagctaagtttttgttgttgtttttgtttgtttgtttgaggcgagtctcaccttgccgcccaggcttgagtgcagtggcgcgatctccactagctgcagcctctgtctcccaagttcaagcgattctcctgcctcggcctccctagtagctgggattacaggcgccctctgccatgcccagttaatttttgtatttttagtagagacggggtgtcatcatgttggccaggctggtcttgaacgcccagcctcaagtgatctgcctgccgcctcatcctcccaaagtgctgggatgacaggaatgagccaccgcacccagccccagctaagtttaactgcagataaacaatgaatagtttttatgagtgtgtcccatgcaataactgggcatcctgtattttacctggccatctctctctgaccacttccagctctagatttctatgagcctctccaggatgggtttatctcatagcctagagctgaacttctgtgatccacacaagtggtaactgaagggaatcggcaaacgttggagcccactttgaaaagcagggtccctccagccagcgggagattctgtgtctttggaaagcagggtccctccagccagcgggagattctgtctctggtaggcagtgagcagggtccctcagtcagcgggagattctctgtctttgaaaagcagggtccctccagccagcgggagattctgtgtctttgaaaagcagggtccctccagccagcgggagattctgtctctggtaggcagtgagcagggtccctcagccagcgggagattctctgtctttgaaaagcagggtccctccagccagcaggagtttctgtccctcacagtcagtgctatgtcttggttgcttttgactttatgaaagaacacatcattttgcttttctgtttgcactgaaaatctgtagagggcaagctgacaagcagtctgttgtgagctggtaatttgtggcacctgccttcaaggctgttgcaaaaacaaacacagccaacatggaagtgggacctgtccctggagatgctcttggccttagagaagctgtgtggcatgcatgacatctgatgtctgtctgtcttgccacccctcaggagggggtggacctctgccgaggaagtcagtttttataattgcccattgcccatccttgtcaccagagagaatccgtgaccatttggcgacagggagatttttttttttttttttttttttttttttagacagagtttcgtcttgttgcccaggctggagtgcaatggtggaatctcagctctccacaacctgcagctcccaggttcaagcgattctcctgcctcagcctcccgagtagctgggattacaggcgtgcgccacaatgcctggctaattttgtatttttagtagagatgggctttctgcatgttggtcaggctggtcttgaactcccaacctcaggtgatccgcccacctcggcctcccaaagtgatggtattacaggcgtaaaccactgcacccggctgacggagagtttttttttttttttttttttgagatggagtcttgctctgttgcccaggctggagtgcagtggcacgatctcggctcactgcaagctctgcctcgtgggctgacaccattctcctgcctcagcctcccaagtagctgagactacaggcgcctgccaccatgcctgactaattttttgtatttttagtagagacagggtttcaccgtgttagccaggatggtctcgatctcctgacctcgtgatccgcccgccttggcctcccaaagtgctgggatttcaggcatgagccaccgcatctggctgctgacagggagatttttatgcctgggtgcaagaaagaacctgttcttcttcaagctgttgtgcaaataattaacaatctgatatttcaacgggaacataaacagagcccaattcaatatgaaacggaagtttttcacacccctgcaaatgtgtgaaaaagatagaacatttatacctaaactagcagttcttttgggcccaactgctcccataccatcatgccaagctaagggtatccttgccttaaatctttttttctcccattaaatctttattttattttctttttcttttcttttcttttttttttttttttttttttgagacggagttttgctcttgttgcccaggctggagtgcaatggcgcaatctcggctcaccgctacctccgcctcccaggttcaagcaattctccttcctcagcctcctgagtagctgggattataggcatgcaccaccatgcccggctaattttgtattttttttttcttttgagatggagtctcgctctgtcgctcagcctggtgtgcagtggcacaatctcgactcattgcaagctccgcctcctgggttctcaccgttctcctgcctcagcgtcccgagtagctgggactacaggcgcccaacaccatgcccggctaatttttttgtatttttagtagagacggggtttcactgtgttagccaggattgtctcgatctcctgatctcgtgatccgcccgcctcggcctcccaaagtgctgggattacagatgtgagccaccgcgcccagcccaattttgtatttttagtagagacagggtttctccgtgttggccaggctggtctggaactcctgacctcaggtgatctgctcgcctcagcctcccaaagtgctgggattacaggcttgagccactgcgtccggccttaaatctttattttctagttacaaagatacgtgtgtttgtaacaaactcaaacaatctagaattctggcgtgtggaatagaacactgcaacccagtgcagtgatgtgggcttggctttagtgtctggcagcccagagctgtagcttgctagccctgggtgctgggagtcgctggacagctgtgagccccagctcctcatttataaaacaggatggtgataatgtttatctcttagggcattgttagggttcagtggcatcgtttttatagcaaacttggcccagaatttggcacactgaaaacagctggatatctatcagctgatattgtcatgacgatgatgataaagtttaaggtaacagtggctcttccctatgtttagacaactgtatggcttctattcagacagatgtagaatcaaagctgtaactcctccttctcagacatttcagctcatctaaggggcctctcgcatgaaagcatctgtggtctctgcaggaggctggccccagatctcaaagggagtggacagggctctccacactcccacataaattcacccccaacacaacaggccacactgtggaattggggccacgtagtgggggtgccctggtggtacctagtggcaatcacactgatgacgatgatgaggatgatgatggtaaaggtggcagcaacaatgatgacagtgacaaggatgacaacagtagtgaggtgacacctgtcttagtccatttgtgttgctgcaaaggaatacccaaggctggataatttataaagaaaagaggttcatgctgggcaccgtggctcacgcctgtaatcccagcactttgggaggctgaggcaggcggatcacctgaggttgggagttcaagactagcctgattaacatggaaaaaccccatctctactaaaaatacaaaattagccgggtgtggtggcgcatgcctgtaatcccagctactcgggaggctaagtcaggagaatcgcttgaacccaggaggcggaggttgcagtgagccgagatcgcaccattgcagtctagcctgggcaaaaagagtgaaagtgtgtctccaaaaaaaaaagtttcatttggctcacagttctgcatgctggacaagaaacatggcgccaggatggtgagggcctcaggctgcttccactcaaggcggaaggtgaaggggagccacagagatcatgtggcgagagggtggcagcaagtgggaagcagggaaggtgccaggctcttttattttttctgagacggagtctcgctctgtcacccaggatggagtgcagtggcatgatctcggctcactgcaacttctggctcccaggttcaagcgattctcattcttcagcctcctgagtaactgggattacaggcatgcaccatcatagccagctaatttttgtacttttagtagagacggggttttgccatgttggccaggctggtctcaaactcctgacctcaagtgatccagccacctcagcctcccacagtgctaggattacaggcgtgagccaccacgcccagccaccaggcttctttttaacagccagctcttgcaggaaccaatagggagcgaactcatccattactgtgaggacggcaccaagcaagctgttcatgagagattgccccatgacccagacacctcccatcaggcccagtgttctgaatcaaatttcaacatgaggtttggaagggacaaatatccaaactatagcaataagaatgatgagaacaatgatgatgatgaagatgatggtgacaactctgtcccaggccctgtcctggaggctggtggctcaatgcctgtttggcagaggaggacacagaacctgggggaccgagccccagcacctcagactcgggaaatgacctgcttgaggtggcacagctcctctagactcccaattctttcttgtcccttcagccagtcctgtgcctgccgcctttgtgctgtccttggagggaggcagaagcaggatgacaatgagggcaagttcagggacactgtgggagatgagaaaacttgctgtgtgaaaactctccacgtgggagttccacacaccccacatcaaattgccatatgtggacgtgaccaccctcgatgctgcacctgcctgaccctcactgcatcctgcccccagtgtcacctgaatcctggctggagctgctcctggtcccccatcctctggtttgcttcttccctccttccctccctgccttccttccttcccctgtgtgttttgaggtaggggtctttcaaattgcaagacagctgttcagagaaaacctgtcagttccagacacctcttcagggaggtggtgctgcctggcacggcataatacagatcctttgctcggccagagcctggccccaggaacgcatctccaccaagctgtagaagctgctagcaggaaaacgcgatctgacgcacatgctgccgcccgcatcctgccctgggagaccatggtggggaggccaggcattgcgcagactctcactgagctgccctgtctcttctggatgttgcctttctttcctttttaagcctttttcttgaagcagtttcaaagttaaagaagagttgtgagaatatgaagaggccctgcaaatatccttcgccagaaatgaacatttacctacacgcgtgtcctcatctctccctgcacgtattcatgcgtatcactatgttcctgctgaacaatttgagagttaagttacggaaatgatgactcttgagcccagacacgtcagtgtatattttctttctttttttttttttttttttgagggtctcactctcttgcccaggctggagtgtagtggcacaatctcagctcactaaaacctccatctcccaggtagctggcattacagatgcccgccaccaagcccggataatttttttttttttttttttttttgaaacagagtctcgctctgtgccccacgctggagtgcagtggcacgatctcggctccctgcaagctccgcctcccgggttcacgccattcttctgcctcagcgtctctagtagctgggcccgccaccacgcctggctaattttttatatttttagtagagacggggtttcaccgtgatagccaggatggtctcgatctcctgacctcgtgatcctcccacctcagcctcccaaagtgctgggattacaggcgtgagccaccgcgcccggccacacctggataattttttgtatttttagtagagagatggggtttcaccatgttggccaggctggtctcgaactcctcacctcaggtgatctgccctcctcagcctcccaaagtgctaggattacaaggcgtgagccaccatgcctggccatcagtgtatattttctaagagcaaggaccatttctttttctttttttttttttttttttgagacaaagtctcgttcttgtcgcccagcctatgggtgcaatggcgtgatctcggctccctacaacctctgcctcctgggttcaagcgattctcctgcctcagcctcccgagtagctgggattacgggtgcctgccaccacgcctggctaatttttgtatttttagtagagacggggtttcaccatgttggccaggctggtctcgaactcctgacctcaggcgatccacccgcctcggcctccctaagtgctgggattacaggcatgagccactgcgcccggccgagcaaggaccatttcttacagaacacagtacaataatcagaatcagaaaacttaatattgaccccagactgtcacctaaaatacagttgtttctcttctgactgttttattacttcttttctttttttgagacagggtcttgctctgtctcccaggtagtgcagtgacaccatcacgtctcactgtagcctccacttcaaggaggctcaagcgatcctcctacctcagtctcctgagtagcttgggttacaggcatgcaccaccatgactggttaaattttgtatttttttgtagagatggggtttcgccatgttgcccaggctggtcattacttttcaaacaaacacaccagtatgtcatgctctcctatctcccagtctcaacagtaaacagcatcccgctgctctcatggtgacgcctccctgtgccccacagcattttgttgttgttgttttactgaagtattttacagcaaattccagacatcattctttctgtgagaacttctgtacagatcactggttttcaaaccctgggttgagacatgtcaaaatccaccgggtgggctgtgatcaatgctgaacaaagacaggataaaagggaatagatgataaaatccgagtactttgtgcagggccggtctgcgcttggttgggatgtcgagtctggcttaccagcagccacagtccagggaggtttgggaagcctggccagcagaggccctggggctctgtgcagctttccctctggcttattgtggttgatcctgacgtcagggctgcaggaccccttggcaaggctggcggcaggagagccagcatgggcacaattgatgagggatggagatgaggtctgctccgccctcccctgttcctggaagctctgtcccctggggactccaagacttcccaggtctgcctggtcactaaaagcgtgggctctagagtccaaagttctggcttcaaatccctgttctgtcacttgctacccagatgaccttaggcaagttaactaatttctctgtgcctgtttcctgtgagatggggacaggaacggtcccaacttcatggggttatagtgaggattcactaaccatgaatacacataaagggctctgaacagtgccgggcccatggtgagtgccaggaaatgtgcctgtcgctcccacaggcctgggccctccgtccctcagccccagccccactcctccgctacccctcactcctcccatagggaaggattctctctcctgcatgtgagagtcctgcagggagcttttaaaaatcccagtgccgggcccggcgcggtggctcacacctgaaatcccagcactttgggaggccgaggtgggtggatcacttgaggtcaggagttcgagaccagcctggccaacatgacaaaatcccatttctactaaaaatgaaaaaaaaaaaattagctgggtgtcatggtgcacgcctgtagtcccagctactcgggaggctgaggcaggagaatcacttgaacctgggaagtggaggttgtggtgagccaaggtcacgccactgcactccagcctgggcaacagagtgagactctgtctcaaaaaaaaaaaaaaaatcccaatgccagccacacaccagaccaattgccccagaatctctgggggtggggctcaggcagcaagcagcattttgtttttaagagacaggctcttgctgtcacccaggctggcgtgaagtggcacgatcaaggttcactgcagtctcaacctcctgggctcaagtgatcctcccacctcagcctcctgagtagctgggactacaggcacaggccaccacacttgactaattttttaaaaatgttttatagccagggtgtccaatcttttggcttccctgggccacactggaagaagaattgtcttggaccacgcataaaatacactaatgacagctgatgagctaaaaaaaaaaaaaaaaaaatcacaaaaaaaattcataatgttttaagaaaatttacaaatttgcgttaggccacattcaaagccaccctgggctgcaggcagctggagggctgcgggttgtacaagcttgttctttgttttttgtttttgagatggagtttcgctcttattgcccaagctggagtgcagtggcatgatcttggttcactgcaacctccatctcccaggttcaagagattctcatgcccaagactcatgagtagctgggattacaggcacccaccaccacacccagctaattttttgtatttttagtagcgatggggtttcaccatgttggccaggctgctctcgaactcctgacctcaggtgatctgcccacctcggcctcccaaagtgctgggattacagacgtgagccaccgcgcccaggcgtaagcttgttttatagagacagggtcttcttatgttgcccaagttagtcttgtactcttggccccaagtgatcctcatgcctcagcctccccaagtgctgggatgacaggtgcgagttacctaatccggaagaaaaggtattttgtaaagctcctgggtgatgtgcggaggctgcagtgcccagctcttcttggctgtagtgtggatgcaggttctgagtgggcagggccagctcagggcctgagactctgcatgcacagctaccgggaagcctgtgctgctgttccatgggccattctgggaacagcaaggccctggataaaaggcctagctggaaacctcgacctcctttccctccctctctgtcaggagggacagcagcagctgacattgttcggacttctcctctgtccccagcacagatcacttccccacactcagttctcgctgctgctcaatgagactgttatgtgcctcacccctttttacatttttttttttctcgagatgaagtctcactctgtcgcccaggctgcagtgcagtggcacgatctcagctcactgcaacctccacctacgggttcaagtgattctcctgcctcagcctcctgagtagccggtattacaagcacccaccaccatgcctggctcatttttttatttttagtagagatggggtttcaccatgttggccaggctggtcttgaactcctgatccacgcacctcggcctcccaaagtgtcaggattataggcgtgagccactgtgcccggccagctcatcccattttaaagatgaggaaagtgaagtcttgagataaactatccgtgatcacatggctgggagttgccaagctgggacctggcccagctagtgcaatggggaagctccagagaccactcgtaagttggaatggctgcctttcatacgcagctggcccaagcctgttcccatcagtatctctcgctttccctcccttcccaaggccccggtctatgtcttggtggtatctcccacccatgtcttactagctccacctggacttccagctccttctcctccaaacccttcctggcctgccatcttcacattcacctccccgatttctggcccagagcaagcatctctgacctcagcaggcacaggaatccctggggccttgtgcgcctgggtgggcctgagctgctgccttgctccccagcctccgggttgctgatgctaccaatccaccaacagcctgcacatgagggccaggcctggggtctcctcacaggtactagccacacacccctctagaaagcagacttgctccttggcgtcctcagaataagctcttaactccaaaccagccccagaaaccccaggtcccacccatcttcggcttctccccacctgttcctgcctgacctcccatcccctggggttcctcccacggactgttgctttatcttcctctggatctctgcacactacaggcccctgtggggtggggccccagcctagggattaggacagtcctgggttcgagtctcagctccacagtccctagtaagctggtagccttgggcaggtgccgccacctctctgagccctgatttttgtgtctgtgaagtggggacagtaatagtaccttgcggggctgttactgaggagtgagtgtcaagagcatgcaggggccccgcaccactggctgctgcttctatttttcaattgcttagaactcgggatgcctcatgttgcaggaacatcatgagaacactggttgggacaattctaatacccgtgggctgggggggccacacgtcctctatagctcaggctgtcagatctccaaagaacctgcattaggggaaaaaaaaaaagcattagaacgggaggtacatggccatgggggcctctgggccacccccgagccctgctggcaggtcttcacatctctgcagctgcggccgtcctgtggctcttgaaaggaaaggcttggtggtgtcggttccccatcatcagttcactgcagcctccgcctcctgggttcaagtgacctcacagagccagggctgcagacgccgccttggcttcctgtatatttaactttgaggcacccgtaagttttttccaccgtcacagactccatctttgagcaaatccagcccagatgtagttgacaggtggcatgacctggaggccggtggtttctctccaccacaacctcctgttttgcactcatcagggccaagggtgggggcccggctgcacgtggccaatacaaacaagtcgcgccctcccctctctcagcgctgtcctctctccacaggcctgcagaggtgccgacatggggcttaagatgtcctgcctgaaaggtaaggcctgaagctctgcccccaccagctctcatggcagagggggtgctgggttggggggcaggagagaggggagttgaagccctctgccctgcagagggagcagggcaccatcccttaaagcagtcctgtacacagcaggtgctctaaaaatgcttgtcctgactctgagcacccctccaggccttctatttcactagcagtgggtgactgggaaggtggcagtgccttggggcctcagtttccccctcagggtgcctaatcccaggctgtggagagtgagggaggaggaggcctttgcgaaggagccaggcatatgctgggctgtttgctttcccaaggacacacccggggcctgttatcacccagacaggaggtccagcgtccaggtggtaggagagaaggccagcgggagaaagttctagaaggacacaaaaccactgaagggtgttgtgggtgttagcaaaggcagcccagacttctgtcctgtgtgtggatggccctggggcacctcagaccaatgttgcaggaaacctcccatcccaagtccattgctgcccctcttctttaccttggtgacagttgctttgttctccccagccaaaaacctgggagtcacgtgggcggcccctggtctgacttgcggccccgctgcctgagaccgcctctggctccaggtgtcccatggccagtggtgtgagtgccaagcttctagcctgccccggggccacctacctgaccccagcagccccttccaggcagaggccacctacccacctggagaggtggttgggagctgagccaagcctgggatcagcctgcatggtgtgagttgtggcctcaccaatgcctctgtgagacctagatcaagggcctcagtttccttatcagtaaaatggggatcatggcggacccgtctcaggtcaccgggagcacgagagcagggcctggaacactctggcggtggctgctcttaattaattgtactatttccttcgtcaaattcaccaggctctgtagcccatcctttgggtttaggcaggcttagggcttttagatgcaagctacagaagcggatactggttaacaaggaatttactggaaagccgaggggagcccacaggaaaagtgaagtaaggaggcgtgaaaaggcccctgctgggagccgggatgaatggaccacccttcagattcccaggctgggaggaatccgctccaggagagcatccgattggcccagtttaggtcttaggcccgcccctttggcctggagggaggtgcatcttgattgacagctcctccaacaccgcttgcggagagattggttcccctggtgaaaatcggggtgtcgtttactaagcgggatgggatgccggacagacacaaacagcccacgtcctctccaggacctggcttcctctgagactccaggctgaccccacagaggagtggggagatgtttgttgaatgagtatctgtgagtggctgaggttaattcagcagcagacagtggttgagagggtcaagcctaaccccttgaaacttgaggactttcttcccttagacatgagttccccagtgcctgtcacaaagtaggcattgaggatacttttcttctttaaaaaataatatatatcacataaacttaccgttttaaccatgaagtgtacaaggttagtggcattaagcacgttcacagtgttgtgcaaccatcaccccacccgtcttcagaatgaaggtttcatcatctccaactgaaactctgtccccgttaaacactaactccccgttccctccccagcccttggcagccaccattctacttcctgtctctaagaatctgctctagggacctcgtgtcagtggaatcatccagcatttgtccttttgtgtctggtctccgtcactcagtgtggtgttttctaggctcatccacattgaacatgcatcactgcttcgttccttttcacggctgaataatattccaccatgtggacagactacattttctttatccacttctccaacgatggacactgggttgtttccaccttttggcgattgtgtcaggacatctttgacggagaaaccaggcccctggaggtatctctgggaccacttttcttccagcccaaggccgggacttgatcaggaaggtagaccaagaccctgcagatcctgacagtgcctgggaaatgccctcccacctccacccaccctcggcccctcacgagtgaaagcacaggcagccagatcagggctcgtggggctgggagcttttaaaaggaccgtcttcctgtcggccccagagctgctaagtgtgctaagtgctggaacagcgcctgtcccgagtgtggcttgtccatccatttttcatggctggctttggtgctgccggcccctgcccacccccactcgcccagcctgggtctctggaggtgatgaggcccacacaagcatgggggtgacttggggaatggggattagggggccagaactcttttttttttttttttttttttttgagacagagtctcgctctgtcacccaggctggagtgcagtggtgcaatctcgactcactgcaacccccgcctcccgggttcaagcaattctcctgcctcagcctcctgagtagctgggattacaggcgtgtgccaccacgcccagctaatttttgtatttttagtagagacggggtttcaccatgttgtccaggctggtcttgaactcctgacctcaagtgatcctcctgcctcagcctcccaaagtgctgggattacaggcgtgagccaccacacctggcccagagagaatcattttaactccatatttgaagtagccaggaactctgtaacatggggtcttactgtcctagggctgccgtaagagatgaccccaaactaggtggcttaaaagaggaatttattctctcacagttctggaggccagaggtgtgacatccaggtgtgagcagggcctcgtttcttctggaagctctaaggaggctccttcctgccaagctcctggtggcaccagccattctttggtttgtgggcttagctccagcctctgccttgtggcacatggctttcctcttctgtcttcccttctcttttaaggacaactgtcatttgctttagcacccaccctagtccaggataatgtcatcccaagatccttaactcaattacatctgcggggctgcacggtggcccatgcctgtagtcccaacactttgggaaactgaggcaggaggatctcttgagcccaggagttcaagaccagtctgggcaacattgcaaaaccccatccctacaaaaaatacaaaaattatcagggaatggtggcatttcatgcctgcagtcccagccacttgggaggcggaggtgggaggatcccttgagcccaggaagtcaaggctgcagtgagctgtgatcacaccactgcactccagcctgggtgacagagccagaccctgtctcaaaaaaaaaaaaaatgacatcacaaagatcctgttttcaacaatgtcagattcccactcacaggctccggttaggtgtatcttttggagcgggcaccgttcagccctggatacgattactctcactccctggggcctcaacactacacgctgcccagggcaccaggaggagggacccgccaggacccaggccctctgcccctctgctctagccccgcagcctggcccagggactcagacccacccacctgtttccaggtgaccctcctgtaccatgcccccagctccaggcctccctgggttcaaatcccagctctgccccttaacgatttggccttggagcagggccagcttcacaggcatgtgacctctgcagctgcacagggccccatgctcagtttaatgctcttaatacatattgaacaatgggcctcacatgttcgttttccactgagccccacaaattacacagtggttcctgccttagggcaagtgaccttgtctctctaggcctcagcttcctctggggtaaactgaggcatcctgcatccagcccacaggttttattgagtgctgggttctggagaggacttgaagaatcataaagacaggactctgctcaaggacatactatctagagccacaccatccagtagaaatagattttgacgtttctagcagtcccatgaataaggtacaaagaaacgggtacgattacttttaatatgttttatttaattcagtatattccaaacatcattttaatgagtggggtccagttcactggtctgggaggttcagtcagctgatctgggggggttcagttgtctaggggatttaggtttgtggtttgggggattttgttgtctggtcttggggggttgtctcgtatgggggagttggttagttggctgatctatggggtttaagttgtctggtctgggagttacttggctgggctggaggctttacttggctggtcttgggggcttggttggctggtctaagagggtttacctgtcttgtatgggggttaattggctaatctgggggttcagttggctggactggggttacttggctggtcttgggggtttagttggctggtctgggggtttagttgtgtggtctgggggttcagttggctgatgtgggggttcagtggctggtctgggggttccctcggctgatgtgggggttcacttgcctggtctgggggatttagtttgctgccctcctttcccttcccctccagtctgggaatctctccctctagaaccaaagtaggctttctgagccgggaggcaccttggcactcatcttgcaaagccttacattacagatagggaagttgaggaccaaggagaggaagtgaccagctacagtcacaccaactagaaatgagacatgggctcctctagggaggcagctccgagacccgttcttattccctttggaggcgtggttacgggaggcatgggctgaacccactcagcagagtgtgagggtcacagtgggtatgacgttcttccctgcgggcttcatctcacccgctctgaccagccacagccccagccctcgccacctcctccttcctcagctcccccaggggctctgaggctgtgtaactgcccaggaagacacaggccccttccctattgggctggctttgtgtcgatggcacccgacttggctggctgggatgggatctgcccactgctgggctggcttccatctctaccgtgcgtgactgtccggtggctgctgtgacaaatgaccacgctggggggcttaaaacagcaatttttattctctcattgttctgaaatcggccctggcagggccgccctccctcctcagcgccaaaggaggaaccttcctgcctcttccagcttctgatagcttcaggcctcctgggtccagtctctgcctctgtcttcacgtggccttcctctcttcatgttgccctgcattcaacctccctctcctcctcttgtaaggacaccaggcattggatttagagcccctccgcccccaaatccaggatgagctcatcatgagatccttaactaattacatcggcaaagacctcatttccaaataaggtcatattctgaggttctgggttgatgtgaatttgggggacactattcagcccccattaagtcagttcacctctgagcttcccctgtggggggcaggaatgtgcttctcctgtctggcaacaaagactctgcccaagggtggtagatattgagagggtggcataggaggaacacagctgtgccaacacccctttgtttccgagtccaaaggaaaggggctgcagagtccctctgctcaagggcctggccatggtgactgtgacccacgggagtgtcccacaggccaaagaaaatctccctcgtgcctcaccctataagggttggcacgtgctggcatcaacaggatctgggcatggcaccctcatcactgctgaactctacagacagggaggctgaggcacaggggacctctcactggctcaaggccacatggccagttaggaggggttggctccacagacggaaggggaaagggggagtcgtctccttggttcctaagtgcgccctctccaggttccagcagggcggcacagccaaggaaatggcatggtcctgctgcatggttctcagtggggtccgggaccttctgtataggcatcacttaggaaccagtcagaccatcagattctcaggacccactggatcaactgagtcaggaactcagggttttcaacacatcctccggggggattccagtggctgtgtaactttgaggaccactggcaaagtggctctggggtcagagatccgagttcatattctgggtctgcctctgactgactgcaacgttgtgcaagtcacttcccgtgcccaggcctcagtttctgtgtctgtaaaatggagtggtgactgggaagatctcctgggtcaggtctcgagagttttctgagataggcactaaagatggcacccaaggagccgttacaccttcctgctatggaggtggctgcaggtgtgcgggggcctctgcaggaagacttaaactgcaggcatgggctttcccactagagtggctggctggggcgttagggctacctgggaggacccctgtgatctgtgaggttctgtgggggcggggtgggcgtcagctccagcctgggttaactccagtgtcaccatggatacaggctcctgggaatgagactggtcccagcaactgtcctggggaaggtcccttggggctgcctggggcttggtgggaaagatgaaggctttgtcctgggttggtagtttgtcattgtttttttaattagactttattttttaggacagttttaatttacagaaaaattgaaaagatagtacagagagttcccacacaccccacaccagattccgctgttatgaacaacttacactcacacggtccactcgttacagcaaaccaatcaatacaaatccattgttatttatttattagtgttttatttatttctgtgcttatttatttatatttttgagacaggatctcactctccctctgttgctcaggctggagtgcagtggtaccatcacaagtcactgcagccttgatctctggggctcaagtggttctcctgcctcagcctcccaagcagctggagtataggtgtacaacaccacgcccagctaatttttttttttttttttttttttttgtagagaaggggtctcgctttgttgctcgggctagtcttaaagtcttggcttcaagcctggacctcccaaggtgctaggatttcaggcatgagccaccgcacccggccagatccattcttattaactaatatccacactttttgtttttttgaaacagggcctggctctgttgcccaggctggagtgcagcggcacaacctcagctcactgcaacctccacctcctgggatcaagcgattctcccacctcagcctcccaagtagctaggactacaggcaagaggcaccacacccggcttattttttttgcatttttagtagagatggaagttttaccatgttgcgcaggttggtcttgaactcctgggctcaagctatcctcctgcctcaacctgccaaagtgctgggattacaggcgtgagccaccgcacccggccagatctgttattattaatgaatgtccacgtgattccgatttcccccatgtattttttctgtcgcaggatcccacatgatatttagttgtcatacctccttaggctcttggctgtgacagtttctcagacactcctcgtttttgtggggaccccaggctgccaggcatggctgtgactccctcgctcggggggctcagcctggggttgattggtggttggccgttatgatacccatttttctgatttgccttcagaggcttgcgtctagcccctggtcaacccaaaacccagaatccctccatatggccccgtgacagtgtgaatgcctggctctgctggcggacagctgcaggccagaattgcgtgagagattgttccctccacaaacgtttattgcgtccctaccgtgcactgggcgctggcccaggtgccggggctacagggatgaacaaggcagtgtggtcctggccactgggagtgtacagaggtgaggagtgaccttaatgctaactcagtgctggatggaagctagcacctgcctacccggggtggctaggggtggcatcacccaggaagcaccccagcctaaagagctggcctggcacagagcggggaaggggtggctgtttccggtagcagaaactcatgggcacgggctgggaagcaagcagcagcctggcgtgcatggtggaggaactggaggggccacaacgccggagaggatggtagcagccaggtggagccaggcagggaatgtggagtttccatccctggggacaggagctctgtgaaatgggagggtgagaaaaacgttcattccactaatacatttcagcagtgttcagaacaaactggaaatttcatacatttgaagggagatcacatggtggaatccagtccccgctgaaccaggagttagaaaatagccaaggtcaagcaccccacttccctgagctttcctgtccctgtctgtaaaatgggctcaggctcctgcctgcggggatcctgggggaggtcctcacccactgcctgccattgccaccgccatgttccaggggtctttgtctactctgctgacctccacacccaagctgcgaacaggagccaacgcacagtcgctgttccatggtgctggttcccttccagtgcgggacagagcccagaggagagtgtgtcccgggcaactccacacaaacatgtactgagtacctgctgcatgccaggcagcacactcagccctcgggatgcagcagtgagcagcacagagctcctgtccatgggggagagacggaaatgtggaatggtgtgtgtgaacaaacacacacccagcaggctggatttcgtggtgagtgctgtgaagggaattgagcaaggaggtgcagtcgaggggatgaggcaaggtgaggggttctctgtggtgccgacactggagttagccatgtggatgcagggaacagtgttccaggcagaaggaacagcaaatgcaaaggccctgagtcaggaccaagcacactgagctggtgagcagcgaggaggcaggtatggaggccgggctgagctggaggagctgaggtccctggggccagcaggtgatagaagctgaggtgtggattgagaacttcagagtaatacaggccaggtgcggtaatacaggccagcacttcggaaagccaaggtgggcagattgcttgaggtcaggagtttgagaccagtctgggcaacgtggtgaaaccccatctctacaaagaatagaaacattagttgggtgtggtagcatgcgcctgtagtgccagctactcaggaggctgaggtgtgaggattgcttgagcccaggagatggaagttgcagtgagccaaaattgccaaattttgccaaattgccaaaaccactgcactccagcctggcaacagagcaagaccctgtctcaaaaaagaagaaatacaaagcactggaatcattctagcccaggagtctaaacctccacccacatcagaatcttctggaaggcttccaaatggatgcagccactgcccattccccagaggttgggatgagattggtgtggatgggtcccaggcactggtgctctaggaggcctcctaggtgattcccctgggtggtccaggctgacagccaatgtccttgccttccagatggggctgcggtggggactggctgcccaagttaacaaggagcaagtcagcctggctgggaacccaggtgtgcaggctcaattccagggctctttctggaaccttctgaacagatctctgcccaggaggcaggagctcctgagagacaccccactccagcctcccttcggctcagggcagtggggtggatcatcaaagcctgttttaaacgagggagcagatggcgtctgatctcgccccgccccctgcccagggcagagcgggcacccctcctggcttacagcagggacttagccggtcccccccccatcagtcacccatgcttaagctaaacctccggcacctgatatcctccgaaaggagggaggccagcaggtgggagacgaagcgccatttccagccgtgcctgggaaggtcagcctggctggtctacaccccagcactctgtgttagtattcgggtgatagttcccaaggatgttctcctcctcacactcctggatccgtgaggtcaggaaccacgctgtctttttgatccctgtagccctggcacctggcccaagacttggcacacacagaccacgcaacaaatgtttgcagaatgaatgtgctctcagccttaggcaccatatggagaccctcctcggactgaccctcccgccggccggggtggctgccctgtcatccccattatcctcgtcatccccatgattcccatcatccccgtcatccccgtcattcccatcatcccacagggagctcagcgctcccaaagctcacacctcaccaggcaggttcagctctttccctccatctcctttcatccgcacagcaaggcttccgtgctgtccactgtccccactgtagatacagaagctgaggtgtcaggtggtaaagctcccacctgaggtcacccagccagagtatggccgagctggatccctaggggcctcaggaacacaacccaacccagcaagtccagagtccagacagagcctccccctcgttccctgcagtttccttagggcctggcctgcaccacgtgctctagaagtatctgtgggatggacaaaggtgaggaatgagcctccagggagacagagggatggggaggtgctgggactcacggtcccaccgggggtctccctggctttgtgttgctcaagactcggaagtcagagcgggccaggtgcagtggcacacacttgtaatcccagcactttgggaggccaaggcaggaggattgcttgagaccagcctgggcaatattagtgagaccccatttctacaaaataaacgtagcccggtgccactgcattccagcctgggcaacagagtgagaccctgtctctgaaaaaaaagaaaaaaaaaatcgaaggaagttagggcagtgttgaccaattaccagctgctggacatggccgggcacgggagcagaccagcctagttatcctgggccagggcatcgcggctgccctcccaggggcctggtttccagagagcagatgtgtgtctgggcaggggcagcctgctcttgtgccctgtttttgtcacccaacagcacacaccagggatggctcctgtcagccccacagtactgcccaccctttcccacagctgcacagcacggctacgtgcacgccccaccaccctcgaacccaaatccggcctgccttgcccaagcaggacttcagtaaatatccttctaccatccactcagaaggtggcctagggtggaacattctagatggttggagggtgtgtacccttcacattttgacagctttgccagtgaaccccctgaagtcacaccagcagccccttccactcaccccatgggagatgaccgtggccatagcgttaacagctttcccgtttttgccaatctgttgggtgaaaaatggtacctcaggagaagttcatgcttcctctgtttttaacaggaagcatttaactttttttttttttttagtacagatgggatcttgctatgttgcccaggctggcttcaaatgcctggctggcctcaagttgtcctccttcctcggcctcccaaagtgctgggattacaggcatgtgccactgcacctggcctttttttttttttttttttttgagatggagtcttgctctgttgcccaggctggagtacagtggtgcgatctcagctcactgcagcctccacctcctgggttcaagtgattctcctgcctcagcctcccaagtagctgggattacaggcatgcaccaccacacctggctaattttttgtgtttttagtagaaacagggtttcatcatgtttgccaggctggtcttcaattcctgacctcaggtgacctacttgcctcagcctcccaaagtgctgggatttcaggcatgagcctgaaattagctgtgtgatcttgggcaagtggctcaacctcttttcgcctccgtgtcttccaggatgagctgggcgggataacaccaggggctgtttagatcatttcaggagccaagtcctgtgaaggcactggcaccgtggcgcctggtgcacataggcgttcatagaacgtgctgagggacctgtcactgcacttgtctcttctcaacactggggccagcagctcctggggccctgggccggggctttcccgtcagcagtgagcccctctgtaagattcgctgaggttgcctgggcaacataggccgggtcccaaagcatgttgctgctgtcggagtccaggaaagtcctggtccctgatcagggagcgagcagagcaaggcagtcctggggccctgggcccactcagcgggagccaggactccccggagagctcaccttgcagagtggctggacctgagctgggagtgacagtgcttggtgccgcttccgctcctgaatgttgctcctacctggagctgcaaatccagcccagccttcagtctgctccgctctctggctgcggcctttcccagcttcagctgcccacagggcccatgttcccctgggatactcccagttcgctcaagtagcaacgttcaccacctttctctggtactaactggaatcggcctgcttatactactccttccaaagcagtaataatggtgctaattatatggcctgactaagtgcctgccattcgacaccttcctcttagtaccatgcatccttatgacagcactgcagtatacaggttattatctagggcaaaagttacagtcagagctgggcacagtggctcacacctagaatcccagcttacttagggggcccaagcaggaagatcacctgagcgcaggagttagcaggccaaggcagcaagaccgcgtgagcccagaagtttgagttccacctggcaacatagcaagaccaccatttctttaaaaaaaaaaaaaaaaaaaaaaaaaaggttagaatctctattccaatgagaaggctaactgtgtgtagcaattgttagcgctgataaccccctttgcagtaggtgacagagagggtaagaaacttgttcagaccacacagcaggtcaagggcagactgggggcttgggttcctctggcttgggccatcctggagcccctccgtgtagccccaggcactgggaccacatggggacagaggaagccagcagctccatgccaggagtgccagcgccagccctgaaatgcccagttattgttgcagtgaatgacaattacccctgtctttgaagaccgtgggtgacgggcctgctcccccgacagccccatgtagagctgccagattgaggaggaaaataacataaaaacaggatgcccagttatatatgaatttcagataaggaatactgtcaagtagaagcatgtcccaagcattgcatgggacatgcctctactaaaaaaactatttgttaacctgagattcaaatgcgatggaaggcccgcattttacctggtgaccctgccctccagggacagttggcaatgtctggaagtatttttggtcatagaagctgggggtgctacagggtctagaggccagggacactgctaaacattgcctgacacacaggacagccccaccgcagagaatgaccaaagtgttagcagcgccaaggctaggggaccctgggtcacacacgagtgtttccgtggccaggcagggtgccaagtacgtggcttttttttttgttctcatggttgtcctgctcttgtttccattttagggatgagtagattgaaggctggaggaggggacactgctgggaagtgatggagcaagggctggacctgggcttcatttttttcttttctttggagacagagttttgctcttattgcctaggctagggtgcagtggcgcgatcttggttcactgcaacctctgcctcctgggttcaagtgattctcgtgcctcagcctcccaagtagctgggattacaggtgcccaccaccacggctggctaattctttttgtatttttagtagagatgagttttcaccatgttggccaggctggtatcgaactcctgccctcaagtgatccacccgcctcggcctcccaaagtgctgggattacaagcatgagccgccacgcccagcgccacccccaaccgcttttttttttttttttttttgaggcaggatctctcttgcccaggctggggtgccgtggtgtgattgcagctcactgtaaccttaaactcctgggctcaagcaatcctcccttctcagcctcccaggtagctgggactacaggtgcacatcaccacatctggctaatttaaaaaaaaatttttttagagatggggtcttgctatgttgtccaggcctgtcttgaacagaattgctgggctcaagcaatcctttgtccttgtccttccaaagtgctggaattacaggcatgagtcactgtgcccgaccctggacctggcctttggaatctgggctcaccacactgtacctacaccctccacagccttcccagagcgcccagtgctaggatgagcaggaacagaccacgggaactgggagggctgcccaggagggaggaagtgcagtcagtgcccagggcaggaatgtggtttggctgggcagagccaggcggctgggcaccttcccccaccttggtgtgtcgaagctcctgtctctagctcctctcaggttgtctctctccagcagctcatccctgacgcaagctagggctttttccttaattaaaaagagatttaaaacatccactgctgtctctatcgggcctgggatgcctcgaaaaggtaaaaccgccaagagctaccccagcctcatccataataacacaaagctttccctgtaattggaattaaaaaaaaaaaaaaagattaaacgcatctggaacccttggaggaatttatcagtttgcttttgaaagacctgcactaaatccagacacccggtcatctctgagggattagtgtcaccccgctcagcccctgtggcccctctgttcctgcctcagggcctttgcgtgtgctgtggcctgtggcccctctgttcctgcctcagggcctttgtgtgtgctgtggcctgtggcccctatgttcctgcctcagggcctttgtgtgtgctgtggcctgtggcccctctgttcctgcctcagggcctttgtgtgtgctgtgggtgcctcgggaatctctcctgccgctttctgattgaccccttctgaaaagccttttccaattcccagtctcccctaaaccctgcttcttggtactgtgagtgggcttatcatctgcccctagtccctgcttgaactgacccaggatcttggaaatatctttgtgcttccagcccccagatcacaggctgtgcgcaaacaggctgtgccctgacttctctgtgcctcagtgtgcccgtctggaagatgggggctgcctcactgggaggatcaaacgatcagtgcccagaggcactcacacagtccagcctcccacaagcactgttctcaaagctcagcatcgtgggcccctcccagtgatagcttgaatcactggggaccctcctgctttttctccagttgaccctgaaatcttggggacctgattcctgctactggagcctggacaggaggtgtaggggaaaggcacagataaacctctgtagaggccgttctttccgcagcagtgtctgcagcacctggggccatgcagggcacacagcaggtgcacaataaatgcctgttgactggccacctccctggcccaggctcagagctggggtgttacacctgtgctgcaaaggagggtgacataagctggctctgcaggtgagaaagcccaggccgagaggcagtgtcacagcaggaagcagaagtgagattcagatggaggatgtcctccttcccaagcccctggccattcccatagaataagggaaaattgtgccccaagagtcaggctggaaccaggaatattttgtgtagcacccactccagctgcgtgaccgcaagggggcgacaagtcccccgacccacactcggggctggaacagtagccgttggcacccagtaggtgctgaatgttgaaggaatcaatgaataagtgccctgaggacacttacacctgcagttcaaatcacgtgatgtggatctaagcttagcatcaactcgtgatctgaatgacagcttgtgtttattacgtgtgcacagcgaggccagcactggagttttctcatccacaaaacgcatatagaatcatcgcaccgcattggctggagtgaggactcaagtgtggtccttaacctctcatgcctgcccacccggacctgggcactgttatttaccccagttctgcaggtgaggaagcagaggcccaaagagggggagccactgcccaggtggaccgtagcccaggtgggccgtctggccgtccatcgcatcgtgggtccgacaggctggagccctgtgtgtgtgtgatggtgccttggggaagagggcgtggtcccattcagggcctccaagtgaaacgtctggggtgcaagcccaaacgctgtttttaaaagaatcaggccgtatggggtggcttatacctgtaaccccaggactttgggaggccaaggcaggaggatcgtttgagcctaggagttcaagaccaatataatgaggccctgtctctacaaaaaagtttaaaacttagccaggtgtggtggagagtgcctgtagtttcacccagcactttgggaggccaagatgggagaatcgcttgagccagggaagtccaggctgcagtgaacctgagccacagagagagaccctgtctcaaaaaatcaattcattaatttaaatgaaatgaaaaagaactagtagagggcgcacgtgagccgtgatgcccacgcttgctcctgtctccagcgggtgtctgcggtgacctctgggcggccgggagttcaccaagagctggcacagggaatggtgccctgaccccagggacctgggcatcctccacagagcctggatgtagcgtctcgggcacgggcttgcctggctcagggcttttgaaggatcagggctgcggatcccagcaatggtgagggcagtggggcctggagccacgtcaagccccagccctgctccccaggctctgtgtattaccagcacgttacctcccttctccaaagctcagtgttctcctttgtagcatgggcgtgatcctagtgttctccctgagggatggtgtgagggttgaatgcaggagtgcaaatggcaggctcagcccagagcctggctccggatgctttggaagtagtggtctcagcggagaggcggcacggcacccccagctcaggaccccctaggccccggccagctggctccccgagggtcatttctccccacacttggcagccccacaccccacacctggcacttcctgcaaggctggtgtcataacagttttacagccagggaaactgaggctgcaagagtaaagccacctgttcccacagtggccctagctcaggggttcccatccctggctgttaaagtcacctgggagtttttcaaaatcctggcacttctcacagagccttgaatcagcctgggctgaggccctggataggtgatgttaacttcccaggtgatctcaatgggcagccgcgatgggaaccgctgtcctggagctaggagggcccagagccgggtctcaaagcctgtccaacctcgccatgccagcacccgcctatgtaacccatgtggaaatccagctccaggggcctgggttctgtggtctggtctgcgtggctctgcccccactgcgaggacagtgcatggccgcagagcgggggtcagggcctggtgacccggagcacgaagcctccccggaagtggggaggtcttcctgcacaggctccatccttctgaagccttgggacgggcctgggtccctgggatctgctcccttccttctggaatcccaggctcaggaaataggcttttaatagcccgaggcaggcacataattaacaaataacaattctggccttagcacaaatgagctccttgtctggggcagggctggcatttggtttttaatccccagcattggcttcatcctcctgagagctttccctcctgtttggccacctctgctgctgaggcttggcaggccctggggatgtgagaggggctggggtgtctctctcctccctgcctgccctcccctctccctcccttcctcctccctctcgccttcctcctccttcccttcctcctccttctccctctgccttgtctgctccctcctcctcctctcttcctcttcctgccctgtctttcctcctccctccttttctccctccttccctctccccttccctccctctgtcctccttccctccctcctcttccttctcccctgtctcctccctcccttcctcctctccttcgtcccctctctcctcctcccttcctctccctcctctcttccttcccttcctcctcttcctcctctctccctcttctccctcctcccttcctcttctccctcctctcctctctcctccttccctcccttcctcctcttcctcctccctccctcttctcccccaacttactcctccctccctcttctccctccttccctctcctccttccctccgttctctcctcctttcctcctctccctccaaccccctctcctccgagacttctgcctctccagggctcactgagaacctgatccttccaggttatatgtgtaggttttgtcctcaagctccagaccacgttaaaatgcaaacgtggggtgttttattttagaatcttggagtattcaccgaggaaggggtttggagactgagcagggaagctccctcctgttacagacacgatcatcagcgattccttttgtcgggggcctccgatcatcagcgattccttttgtcgggggcctccgcaaggagctctttgtggatgataatagagaacacttatggggcagctggctgggcgaagtgctttcgtgaattcattcatgtcctcacacgcagcccttcaagagggagctgccctgcccacctgcagctggggttctggctgtggcttttgtttttggcacgaacaagcctcaggctttcgaggttctgctattgccagtgtgtcctagatctcagctcccctccgcagccagtcctggatgttatagagcagggattggcaaccacagccctgagacccaatcctgcctgatgcctgcttttagaaagaaagttttattgagacagagtcatgctcgttcatttccacgttgtctacggctgctttcaggctgccgtggcaaagctgtgtgtgtagtttgtgtggcccacagagatcaaatatttcctgcctggccccttgcagaaagtttgccagctgttacatgggattatgctacaggaagcaccggctcttggggtcagccagattccagtctggggatggatcctggccctgcctcccactagctgttcagttgtgggtggatattactctcttaggtccccagtttccacatttgtaagatggggctggtgacaccgagcacggtggccatggagcctgaaggagcgcacgcctcggccccagtagattgtctgggcggtggcaacacatccctttgtctgtggttgtttggggtaggggcgcctctctccaagtgacttcctttgatttgtttcacactctgggcttctgtgcaagattgcaggagaaatgttctcttcttttttttttttttttgagacggagtctggctctgtcacccgggctggagtgcagtggcgtgatctcggctcactgcaagctccgcctcccgggttcacgccattctcctgcctcagcctcccgagtagctgggactacaggcgcccgccaccgtgcctgcctaatttttttgtatttttagtagagacggggtttcattgtgttagccaggatggtctcgatctcctgacctcatgatccgcccgcctcggcctcccaaagtgctgggattacaggcgtgagccaccgcacccggctgaaatgttctcttctttaaagaaggttcaaaccccactgtattagacctgcttcgatgggactgtgtgggtgccgctgaggggctcggagttctgttgggctgaggtggcctcttccctcaaaactacccagcagtcgggggccaagagtcttccaaggccgggcacggtggctcatgcctgtaatcccaggactttgggaggccaaggcgggtggatcacaaggtcaggagttcgagaccagcctggccaatatggtgaaacgccgtctctacgaaaaatataaaaattagctgggtgtggtggcaggcgcctgtaatcccagctactagggaggctgaggcagaagaatcgcttgaacccaggaggcagaggttgcagtgagtcgagatcacgctactgcattccagcctgggcgacagagcaagactccgtctcaaaaataaataaataaataaataaataaataaataataaataaataaataaataaataataggtcttccaaaggaggaaacagtgttggggttcagaaggtggggaggtgactggggcagtgcctggggtgaggggcggatgctcgtcactgggtttgagaatgaggggagggaagtgagtggctgtgcacaggacaaagggggctcatcatggtcacctcacaccagccgtgtgtcccagggaccgtggccgtctctccccagcccagggagtcggctgattcccccactaccaccttgcgcttgtctgtgaaaacaagaaggctgcaaagagttagactaacagaagtggggcgggggcacacatgaccacccacccttccaccaccagctgcaggtttggggcttccccaaaccaccctcatgtttgttcatttgctgaaaggactcacagaagtcactggaggctctgattcccggttatggctcattccagggaagggacccaggttaagaccaaagggaagacgctcacagggcagatcccacgagggtcccaggcacagtctcccactgtcctctcctcgtggagccatggacagcaccaactcctcctgacgatggtgcgtgacagcacagagcatcatcaggagggaagccccttggcttcagtgtccaggggctttaaggattgaaccgtgtcttccaaaaattcataagtcaacctcctcgcccccagggcctcagaatgtgaccttcttgggagtagtgtctttgcaggtgtaatgagttaagatgaggtcattttagtagtgtgagctcctagtccaatatgacgggtgtccttatcaaaaggggaaatctgggctgggcgctgtggctcatgcctctgatcccagcactttgggaggccaaggtgggcagatcacctgaggtcaggagtttgagaccagcctggccaacatggtgagaccctgtctctactaaaaatacaaaaattagctgggcatggtggcgcatgcctgtaatcccaactacttgggaggctgagacaggagattttgtttgaacccgagaggcagaggttgcagtgagctgagattgtgccactgcactgcagcctgggtgacagagtgagatccgtctcaaaaaaaaagcaggggggagtctggacagagacaagacgcagggagaatacaatgtgaaggcaagaggtagagatggggtgaggcttctacgagcctaggaacgccagattgtcagcaaccaccagaagccaggggaggggcttggaacagtctcccttgcagcctccagaggaaccagccttgccaacacctggatctggaacttctggcctccagatctataagacaatgaatgtccattgttccagccgcctggttgacggtgctttgttgtggcaaccccaggagacgaaggcactggggctcctctggaggctgattgattgctcactttggagctcaggctgcaggctgctgtctctccgggcatgacccggagcccccctccatcaatcacgcctttggacacccagtgtaaccacagcccccggcaaacaaagactctcctatcaggcaagatattccaagggcttagagagcacctctcagaaaccgcggacagagaccagacctctttttaggcaagattaaattatttactgcacaaagggcccagagaggaggtgcagtgcacgcagggtcacacagctggtggcctgattccaaagccagtgtgcctactgctttcagtttttctgagcctgcagccttggtcaagctgcaggtgaaccaagaatttggcctgaatggcatggctccaggtcctctaggtgtacatgcttttgtggattcaaacagatcatccctgacagcccaggtgtaacctgcctctcagaggaacaccccttgggtgaacaaaggttaccctgagaagcctcctgtgatttccccacagccgggtatgagattcccactgtgcacctgccatcccttcctactgggtcagggaaagatttgctgactgtcagtaatctatcactgcataacaaactatgccaaaactttgtggcttaaacatcaaacctttattatctcagagtttctgtgggtcaggaattgaggagtggcttatctgggtggttctggctcagggtcgatcatgatgttacatccaagatgtcagccggggctgcagtctcatctgatggctggactggggctggaggctccactgctgaggaggctcccttgtggctgttggctagaggccttgattcctcacccacgtgagctgctccacaggctgcttgagcatcctcgtaacatggtggctggcttccccaagagcaagtgttccaagagagagcaaggaggaagttgcaatgtcttttatgacctcaccgtggaagtcacacaccatcatggcagtcctatttgttggaagcaagtcactaagtccatccacactcaagggcttagactctgcctctcagagccatatttcagaacccccacactgaccctacagtggtcacttaggaacattgtcctaatggtggtcaagggaggcctgagaacagtaggaaaaatattcccccaaccccttattactcagcttctcctgttggtcaggggctctgatacttgagctaatttaatcccagcctggcaccgtttggggcaaaaccaaagtgatgggacatagagacaaggattgtaacacctagcttaatgctgcctgaagggtttttggttgcgtttaatttttttttttttttttttttttgagacagagtttcactcttgttgcccaggctggagtgcaatggcacaatcttggctcactgcaacctccgcctcccggattcaagcaattctcctgcctcagcctcccgagtagctgggattacaggcgcataccaccatgcccagctaatttttttttttttgtattttcagtggagacggggtttctccgtgttggtcaggctggtctccaactcctgaccttaggtgatctgcccacttcagccttccaaagtgctgggattacaggtatgagccaccacgcccagcctttttttttttttttttaagatggagtcttactctgtcatttaggctgaagtgcaatggtgtgatctcagcctacttcaacctctgcctcccgggtttaagtgattctcctcctgcttcagctcctgagtagctgggattacaggtgtgtgccaccacaccgggctaattttcgtattttagtagagatgggggtttcaccatgttggccaggctggtcttgaactcctgacctcaagtgatctgcccgccttggcctccgaaagtgctggcattacaggcatgagccaccgcgcccggctggcatttgaaatttaaagcactcctacttactctgtctcgagcatgcgctaggctcaagggaaacacagatgaatgaaatagagactgtcctccaggtgttcacagcaaagagaggcagaagtaaaaataaatcatgtcattcattgatgaatgagtgagtgcagatgggcaaaagagggagcagccagatctgctgggacacctttcccaaggaagagcccgttgcactgggctttgaaggataagcaggagcttgttactcaggcagaggaagaaagagcatcccaggcggggggagcagcatatgcaaaggcacgaaggggccccaggagcctagggagtctggggaagtgtgagcactttggagagtggaggctggagcgctgtggagagtgggggctggtggccgggaatgaggctgcagctggctgggccacatggtaaaggctgacaactggacccagaggccaactagcctatgatcagcatttcccaaaatctgtttcccgactcatggttctgtgagatgtgacaagggctcctttttcattcctgagacgccggttttcatctgtgatgcggggacagctgcgctccttgctgcgaggcgtcaggacccaggtgatagtgaagggagggtggcgcccgcggttcccggcggccactgatgcctgtctctctgtcgtgtgtacgtgcgtgtgtgctccacgcctggcttctcaggctttcaaatgtgtgtcagcagcagcagcagcagccacgacgaggcccccgtcctgaacgacaagcacctggacgtgcccgacatcatcatcacgccccccacccccacgggcatgatgctgccgagggacttggggagcacaggtgaggccgtcccctccaccgccaagccgggtcggctgtgggggcccggtggagacagctctcaggggcgtccttcctggccacggggcctagcttgcgtccccacctcccactgggttcgttaaacatttatggtcagacctgtgtacactgcaccgtgagccccctgccacggcgccagcctcagcacgacgcggcgtgttaagtaattagtagacagcccctgccagcagccaggacgcttgatggatggggccgggctggcccgccacgccgcggctccggccagccaaggtaattgatggatgctccttcccctgccagcgggaggaccgctgctccatcttgttggccgctgcagtttggccggacaggacagacttggaaacacagctcgtgcccaggctggggccggaccctgggccttccagatgcagctcactgctgggagcggcgaggaaatagagttcttcccagggagagggtgaggaggtgggagacagaggcccaaatcggcagccctacctgcctctctgtgatacctctggagctggtgggacaaattgttcatgtattcattgagcagagatttactgagctgggcctatgccgggtgctgaggctgctgctatgaataataataataataataataataataataataacattggggatggtcatgataggtagcactgtactgagcgtaacaaatggattttcttatttagttcttacaggaattctcagagttcagagttaagtacagatttcatccccattttattatttgtatttatttatttttttgagatggagtgttgctttgtcacccaggctggagtgctgtggtgcactctcagctcactgcaacctccacctccttcattcaagtgattgttctgcctcagcctcctgagtagctgggattacaggcacctgccaccacgcccagctaatttttgtattttagtagaaatggggtttcgttgtgttggccaggctggtctcaaactcctgacctcaggtgatctgcccacctgggcctcccaaagtgctgggattacaggcatgagccaccacacccccattttagacaggggtaaactaaggttgagagaggctgagacacttgccatgtgctagtcacgggtgccgcaggcatgcagccccaggctgtgtgatctgcacttcaccccgtggcccccaggccggatgtcctccccgcaagtggcatcagttagctgacagccatcatgacatgggtctcgctgggcccatgcaggggacaaggcacccatgaggctggtgtagtgtgcatggaaggctgtctgggagggggaatccatagacccttccagatgtcctgagcttgggtctccacttgcccagcagagcgagtgactgggagaaagctgtcaggcccctctgggttgggccagtgcaggtgctgggtggagccatggtgggtgcaatggggcgcattcctctgtgacctttccaagtgcctggcaccaggctaaatgcttttcacaaatctcatttaattctcattccaacccttatctctagtttagaaatggggaaacaaacaggtccagagagggacagtgcctcgcccagggacacacagcaaggtgggagaagagctgggctcctgctgcagtgcgcctcctgcaccccagtactgtctaatcagagagcccagtgtgggcggacagaggcgcaggtccttagctcggctgtcaaagtctcttccctctctgagcctgtgtcctcacctataaaatgggatcataccaccttccctgctcccaggaccagtgggggcataggggagacacagggttactctacaaagtccgagccccagggaggttcctgaacgctgggaggggttcctcttaaactgaagcagttccggggtccgattcacccagaaggatccagcatcactgggctgggtcccatctcagcctctggcagcaccagaaagcaaggaatcccagaggccccagccctgcagttcccagggaaacggggcttggtgtggtgggggcagggtgcatccaggtgtccatcccctctttctcctagtctggctggatgagacagggtcgtgcccagatgatggagaaatcgacccagaagcctgaggaggtgtcctgggtttggctggctggctcctgctccagcggcccggcttcaggtgtccgggggcgtggctgcctggagcaggtgtgctgaataccctggatgggaactgagcgaacccgggcctccgctcagagagacgtggcaggaccagcgaggaatccagcctgtccacttccagaacagtgtttcccaggccccgctgagtggaccggacctctgacacctccaggttcttgctgactccggcctggtgaaagggagcgccatggtcctggctgttggggtcccagggagaggctctcttctggacaaacacaccctcccagcccccagggctgtgcaaacacatgcccctgccataagcaccaacaagaacttcttgcaggtggagtggctgttttttataagttgttttacagatacggaaacagtccaaaatgggatttataatttcttttttgcattataaataaagatcctctgtaacaaatagtgaa

SEQ ID NO: 11 - RNA, 899 nt, Homo sapiens
cccgagcgccggccgggccaugacccccgcugcucugucuugcaggcucgucgccgcggccccccgagcccgaccgccgccgccaccaccaccagcgcccgggcgggccucgcgcgccucgggcgcggcuccgcagugagcccaccaagaaggaagcggccugcagaggugccgacauggggcuuaagauguccugccugaaaggcuuucaaaugugugucagcagcagcagcagcagccacgacgaggcccccguccugaacgacaagcaccuggacgugcccgacaucaucaucacgccccccacccccacgggcaugaugcugccgagggacuuggggagcacagucuggcuggaugagacagggucgugcccagaugauggagaaaucgacccagaagccugaggagguguccuggguuuggcuggcuggcuccugcuccagcggcccggcuucagguguccgggggcguggcugccuggagcaggugugcugaauacccuggaugggaacugagcgaacccgggccuccgcucagagagacguggcaggaccagcgaggaauccagccuguccacuuccagaacaguguuucccaggccccgcugaguggaccggaccucugacaccuccagguucuugcugacuccggccuggugaaagggagcgccaugguccuggcuguuggggucccagggagaggcucucuucuggacaaacacacccucccagcccccagggcugugcaaacacaugccccugccauaagcaccaacaagaacuucuugcagguggaguggcuguuuuuuauaaguuguuuuacagauacggaaacaguccaaaaugggauuuauaauuucuuuuuugcauuauaaauaaagauccucuguaacaaaa

SEQ ID NO: 12 - protein, 76 aa, Homo sapiens
MGLKMSCLKGFQMCVSSSSSSHDEAPVLNDKHLDVPDIIITPPTPTGMMLPRDLGSTVWLDETGSCPDDGEIDPEA

SEQ ID NO: 13 - DNA, 53560 bp, Homo sapiens
gtccttatttgcacccgccccccgcccgcgtcggtctggggcttttgacttctccccgaacacatttcccctcccgtcgctgggtccctgcgatcgcccccagctggtggggctcgcggagctcaggggagcggggtcctctgcgccgctgcagcgcgagttaataaacagttaagtttggaagactctgcagacacgttgagggggagttaccaagcccaggcagcaaaaacatcctggcacattcctggggagtcctcagctgccagcatctgattagaaccatatctctcgccgggagtggccgcgcggctccgaagctcccggccggcggctatttaagcgaggcccgccgcatccgctgcgctgtagcctggaggctccgggcgcggggaagtcatgctcgcttcacggaggcaatagctagccggtgagtagcttcgaaacccttcttccctctggctccattttttttttaaagatctccttctctcctttgctccccctctctcacccccccgccccccgctacccttctttgagtacagaccttgggctgtggggaatcttagaaatgagaccctgtgcttggggaaaccagcagttttgtggcctgacatctgaggaatgcttccgcggaatgtatttacctttcgaatccgactccagatgcccagcttgtgacatttaacaaacgcctccttttgtgtcgtgtgtgtgtgtgtgtgtgtgtgtgtgtgtgtgtgtgtgtgtgtgtgtgtgtaaaaggtctgcgggcagccctcctaggacactgaggtggctgctgaccgcctaattaactcctcgaagggtgtttatttttgctgtgtgacaaaggctggggacctggcttgtgcccataaggagctttttcctggtgactgacaacatatggcattaaaatgtgaacttttgtcttacaccggcattcctaaggaagtatctacccaagggacttaagaaacttgttttatatcccccggcgcagggagcatggtttatatggtgcttgcctgcctgttgtaagctggttaaaaagattaagtaagaattctaaaaaaggggggaaaaatgaatgggttaaaaccgtggagcctcagtcaacatagcggttttcatagcatagagctgactctgttatttgtttctgctgtctttccctcttgacttaattctgagcctggaattctggtccgcagacagtttcagcagggagctgagtccaaagggaaattcaactggattaaaaacacttaaggaatctgggtgttatctccaccccaaccaccccccaccttttcccctttctttttagtttttgtttggaaggaagagagccgctctgtaaaccgagaagagcagaaacaagcttccagacacatggaaagacttaaaaattatggaggggcgacttcacgaatagtaaatgttgctattgctctataaagtgacttcatgaaaaaatttctggccttagtcaggcaaagcaggggcatgggggagaaggaggtaagatataactaatgcaaacagaagtaatgggagtggaaagcaggcatctacaaaaaatgcctttgagatgtctgataagcctcttggaatggctttgatgagatgtatacttgattgtccttacagtcttgaggttggcttctcacacaaaagcacctactggctgttggggaggagggagcttgcagctaccaaatggcttgtcaccatgcttcttaccccagcagccagactttgggaggctacttttctctgagccaggtgccccgcccactccaggttctgtgtctcccctcttggaagggagatggccctcagtgacactgtaagaaagtttattgccttgagaattcgggagtatttgagtacaatgggaaagtcttctagagaaagcatgaagaagacctagtggtctttgccaatgtggatttctgggacagaccacttcttccaaatccttagtcagtttcctcctaaggccaactaaattctttttcctgttgttggtgaataacttcccccttcttttcccactcccagctggaaggatcccttctcatccaaatgactgacctagaaaccagtcatttttcagctatgccctcctatgctttaatgtataaccagaataagtagatggtagaggaatgtcttccaactttgagcccatacacgtatgtatttgccattctggggatctttgatcttgatggttgatctttacctgaggatgtaagtgagggaagaaagcacttgttacaaaccttgtctaatttgtgaagggcaaactccagagtttgtgtttctgctaaagacttttatagtttcagattaaactggaagtccaaattcctgtgcattaggcctgtttgttgtctttctccaaaggttgaatggatttcactggccttgtttgggttgaagggtacggcttttaaggcacttgttggcatgaaggtagtacagggacctctggcagctgctgaccagctgtttggggatgatatttactggcctgctcaaccaggcctcgattatctgaaggttaagggagcaggaagatatcttccttgctgagtgctcctggccaagcaggaggctttgctgtgacataggctcttatgctgcttcatttctaactctaccctcatatgtccataaacctaagtttgctaccactgatatttcatctggataattttgaaggctctgcgtgtttctcttcctcattcttttgacctgaggatttaattattgctcttcttaaagacaaagccaagatgctgaaatgcttgggaaagctgctgagagtgagccctcctggggtttgaagttgtcctaatgctcatcagaacatacctccccagctggaaagattcgaaagcttactggccaggaaggtttaggtaactaaccaaacacataaggttttttaccctttagacagaaccagaatgggaaccagattggcaatatgaaacacctgagtaacaggatgtggtattttaaaattctccctggcactgctatgtaattccaaagttgaagctgtgccgctgaattgcacaaaggttggccaaaatcatatttaggtgaaacagatttttgttttgttttgttttgttttgtttgagacagagtctccctctgttgcccatgctggagtacactggcatgaacttgacccactgcagcctctgcctcctgggttcaagagattctgtgacctcagtctcctgattagttgggattagaggtacccgccaccatacctggataatattttttttttttttttgtagtagtagtagagacggggtttcaccatgttggccaggctggtctcgaactcctgacctcaagtgatccacccacctcggcctcccaaagtgctggaattacaggcatgagcccaccacacccggccagatgaatcagatttaacaccagatatgtgtctttaaaggagacccaactcataatatcagcatatcctgactggattaactggtggaaatcagaaggaaagcagactcctcagtctttacttaaagacagaaaacaagcaaattcctggttaggggaacaaatgatgactggtacggacacagagggctaacattcaacactggctgcctccaacagggcacaattggatagtagttgagaactaccttctgaagtaccatttcctgggttcaaatcttagctacagggttgcaggttacatggccttgggcacattccataacctctctgtacttcagcttgcttatctggggagaataatagtacctaccccaggattgctgggaagacagctaatctaatatacttggaatactttttcccatctgattttgaaggttttgtttgtttgttattactcccccctgaacaactgaattaagtgtctttgtgaaaactgaaagcaaatggaaaatttcttcatgaaaattgaatacccttcacctacttgaaaaaggttaattattcaagcacttgattttaataaagccagtgcgtttgcttgtgctcatgctagaacagacagggagttactctctgttttcgtcctggaagcctgcactttggtttggtcaggctgacctcgctggtctcaattaagtcctccccacaccctctcagactcctgacagagaaggagcaatccttccccctgaagtcagcattgtcacagaaggaagtgggaagggagggaccacccggattaaactgaatgactaggctagaaataaaaattcttccgagtgtgtgcaggccccatactatccttgcccacatagctgggcaggttgccatggttactccccttcccgcatccttctaccctggaaggaagcctgcctctctaggggaagtagaatctgaacaaattgcttcctggtctaaaaatggaagttactaagtgaagtagaatctcctctctacttatatcaccccctccaaacttattttaatcccaatacttaattttctaaccttcctagttcttgcatcatctagatagcaaaacatgaaagcttatgaaatttctggaacctaaaagttactacctcaatatagaagcagcctggcaagttttccctactacatttgtactagctagctaggggcaagtgatttttaactaagtcaactggtaaaaattctaagtgaatggggcaggctgagtgagtgttacgttgaaggtaaacaatgtatgagggctgtcacttagattttcaggtaaccatagagtaaagggagcaggtaaataggaagtaacaatcctagaatgctggatttgaagcacctttcaacctagaagaaatctggatgagggaaatatggtttaatgttgtctcttggtaaaaaactaccctattgctacctagcaatatgatgcaaaatgttagtcccaaaaagactttgatctttatatgaaagatgagctgccatacacaagtttgcatttgacaaattaattcagtctttcaaaattggacatttagcttgatgtgtatttcacagcttgagggaactcatctaagacaatagttctcagagctgattcccaaaccagcagcatcaacatcagctggggacctgtcagaactgcaaactctggaagtagggcccatccagctgtatctaaactagctctccaccacgtgatccaagagtaactttcataattcagtggttttaggattcacttcttcagtggaaatcataacaaagtatttgaattccttcagtcatggagataataaagcaaaagcctttaaacacagtgcagtttaactgaatcttaggatgcagaaagattaaaaagcatgggatttggatatttttcccatataccaagtatgactttcttgatcctaggaaatccaatatacttttggtttgatattatcacctcacttccaaatcttttcccctctgctggggtttttaaagagtataattaatcttcatttattaggagactgtcccacttacttcttttaaaaaggattccagtaaactagatcattacccttgaaccagatggttttctctaacctataaaactttttattttgtttttatgccatgtctagaagtgcagatgaagtcctctccataaatgagtctacttcatttagtttttgtaaagtttaatggctaacgaagcactgctcctttctcccattcgactttcactttaagtaacttgaaatagaaaagatatctctatttattggctccaatatgatgagtatcttgcccaaggtgttatcattaagtggtagagccaggattcaattatgaatctttatgatttgcaccttggcgtttatctgaatacttagcaattacctactatgtgaagtctgatgctaggttagcaatggaaaatctcccagtgagcagaaatcaaaacaaaagtcttcctcatgtgtggcaaaggacataggatagagagttaaacagacttacatgtgaatggcagtgctaccatttcttgggcatgctattcaatgtctctggcccttagttgtctcacttaccttgcaaaaacagtcctaagaatgcctgatgtcaaacagagatcacatctcaaactgaaaaatacaagggtgtgatgtacaagtatataattggaactctgattttgaaaagccaacatagattcatggttaagagcttgggttctaagctgcaaatgactgtgcccacagcctagctttgccatgtaagacaagctatataaggcctgagcttcatttctccatcaggaaaatgagttgcctcgattttaaaattaaaaactcttcagaactcctgcggctgcttctgaaatttacctgtcctagaaatgcaattctcaatgcaataactaagctgatattttttaaatggtcttgttctcattgtttttgagtatcaggcaagctaaattctagagatgcacacattcaggctgaaaattagaagactgtctttcctatatatctttaaactattaaatgtgaataatcaaggaggagaatgtggcaatgcttcataaatcagtagaggcacacaaatactaactttaaggtaccacttaaacctcatctgagcagggcagttaagtcctcttaaggtctatagttaatccatacccaaagaactggaaagtgaataacttcatccctaattgtgtccatattgaacacagctgccctctcggttctaaatattgcatccaaatgatctcacttatttttttatattttaagtgtcctattagggggccaagacctggtctagttttctgtaatatgtaatacagatgctaacgtgctttttgttaccatttagtgcaacagaaataaaccaaatgtgtttgaacatatgtcagagggctgacataatcatatgaagaatgctataccagtttggctttgggacgaaatgtgaatctactagggcaacatacaactgccctctgagtcagaagatcagaagttgctgtggctacacatagtaggtgctcaaatatccatcctttaaagggaagggtcagctgtgctttagttatatcagcattaggttttgttgttgttgttacttgattttgttttgtgttgctccctgccccctttacctctaaaattaagcgacttaaatgcaattcatttttgaagtagaaaaaacaagtatgtagctgatagaacaggcttttccatcaattgttggttgctagtaaggagggtcaatattgatttctgcctgggctaaggttcaactatagctgaggcttttcagagagcatacatgtactagaattgaaatgatagacagttatatttaatgtccacgctgtcttctaaaggatagcttgatgcagaaatgcttgcttaactgcctgaaaacctgttctttgtgatttctgatttgtctaactggtctgaagttcccaatgactaaaagttgatagtaattgaaagttgggtgcaaatatttaccttagagggacacatatatgacaagagctgcctataagatagttagagaaaatagtaactactcaactaacatatgattttattgtagttaagtggtacagagtgttgtgtggatccagagggagaaaaaggccattggtgttaatggatttggcttttaaaggaacaatggaagtcaaataagcaaaggtaagaagagaaaatgcattttaggcagcagcgcatatgcaaatcatgcagttggatgaacttaggatatgcctaaagaactctgactggtcagtttggccaagaaacagtacaggtggcatagggctgagaagtgtctgagtttgaaaagtagggatgaattatactgagccatggatgtcaggataagaattttgattttttttttttatttttatactttagattctggggtacatgtggagaacatgcagttttgttacataggtatacatgtgccatggtggtttgctgcatccatcaacccatcacctacattaggtatttctcctaatgctatccctccccttaccccccaaccaggcgccggtgtgtgatgttcccctccctgtgttgatgtgttctcattattcaactcccacttacaaatgagaatatgcggtgtttgccaagcagatccgtcattaaagcaggaaaaccaaatgctgattgggataacttaacctggctctattggcagaatgtgtttgagtggagattgcttagtagttgaagaaaagcctatatttcttcaaaaatcatcaaagtagagaaaagggttgcttaacctaagattaaggtgcaaaaagaaatatttattacccctaatgttttaagcgcactgctcattaacagactgtgtcgagcctagaaaagtagggcaaataattttcggatcccaaaagctttattgaattgagagaagagctctacatgaatcagagggcaatgataggtcatggcaaatgtgaggaaatggctggtaagaggccggtaaagacttccctgagaccacacatcttgagtggccttggaatgaaggttttcacgaaattcaagaaggtgaaggcagtacatattacaggctagcagaccacataagaaggtctggtgtgtctatgtgtctgtttaggggaaacagaagacaacggcctcttcagagagcaggtggccatgtatatgtatagtccacagcctgattagaagggctttgaatctcagcttgaatgtgaatggaggaattgaacaccgatacctgattaattcaaaatcaggaaagctaggaggccagtaaacactcctacaaaaatttagccataaagggagatcagttacaaccagagtctcttacaccttagattctcactgaagccctttggagaaaatggaagaaagagctcatcccataaagagttgtttgtttgtttgtttttcacttcaagtgttttaaatatattaaggagtacttatgctatgtgtgtagaaaagatcaacaaacaccataatataagtccgctaatcatgagggacatgtatgatacaacgtggtatagctttttagggaggaggaactcagggtggcggtgaggcaaggttgaggaaaaatgctggaactaagtaaaaaaaaaaatatgatggggagggaggagaggtgtgaaaataaagggtaattatgaaaagtagactttcagaggtttgactcattcattaaacatgaacagtttaggataaaatcttagcttcattctaagctgcagacagtactgttgtggatcttttaggtatatctgcatacgaagtacattctgtaatgctgttcccacttagtgtatagtgatgcaaatgttcagttttctgcacaagaactctttcatagaaacagtgggcacaaccatgttctgtgttaggatctggactcttacacttcatgcggccaacatttgtggagggctcactacttgtattgatcatgaagtccatttccttgaagactgacattgaccaagtgctgcctggtagccccttgataatgctcttgtgacttggtagtgctctttaaataactaaagcaagctgtagggacccttggttacattttcataagattgtttcactgaaatctgaggttcaatgtttggcctgatctgaaagtgacacgttgtattcttagaaaatctggtaattaaaagtgccacagaacatgtctggttctagaatacagaagttccctgaattgcttgtacttcttaagtgaatgccagactgaatgccaaatgagcatagtgtttccttctggtgtttatgaagatagtgttgattcagaactttggatcttatgataactctgaaggaaacatcactgaaattcttcaataccctcaggtataacagaattgcttccttctgttactgccatacagatggtccttcagattgtaacgtggttataggagactcataaatattaaatgtaaatatcccctcaatttgtgtcataatttaaaaattgttgaagagggttattaacccttcagacaacatttgcatctttccataattgatatcaatacagcaatttatatataattccttgatgtaatactactttttcttccttttatgaagtattattaacagcaatgaagctttctaccctaatcagaaacaattcctccaaaacacatagcatcagttataactgtgacctgcttgttctttctcccctacctaacctctaagcccctttagagtagagaccatgtctattttgtcactctatacataggataatgcagtgcttggcaaatagtaggtgtttaataaacaataaccagatggccaggtgagtgagtaactcaagccactttcatttacaacatcaattgcaatttattatagagtgagcaaaatggaaaactttagcttgccttatcatctgttggtataagtaaaacaattctgaccacccccccccctttttttaactttaaggttatttataatgagcaatatccatatgttcttctagtttatatctgctcagggcctgaggaaggcagacaagctgttactgaaattctccagatggtgtggtctttccaagttgctagtttaacttctaccaatggagtattcatcattgctcatatatctgtctgacctgatggatgtaatcacctggctaataagaattgtggtgaatagatttcagcctgatactttatccacaaacaacttcttattctccttctgtttctccttttaaaagtgtccaccaaattgtttataaaattactaataaaatttgagaaaataggtaagacctttggcttagcactggataattaaggctattgctttgacttaacacaatttctgcccaaatcaaagaatcttgttttgttttgtttcttatttccctgtgcagctgtattgtgaattaagatatccattaggctctttaaaatgctaaaattaggtcacaaactcattactgtctgcacagaccccagcatttccaagaaccccaggctggaaaccaactataggccatccactgaccaactttgaaaatcctagcataagagttttttgacttctacttatcatttgactgaaaacttactgttgaatttttcatatgtcaggagctttccccaacaactctgcctagctatcatttaatgatgcctaagatgaaagtgttgacagctgactatgggcactgttctatgtgatttcagatatgcttatgttctatgtgtggtttcccttcacttttgagtttaattgaaagtgactgaaccctagagcatcttcatgattctgtctttagcccaagttagactgtagacttatgcctacattttaagctttgctgtctaccaaattagcacatctttaaggaatttaatttttaaaatacagaaagcgcatcgccccaatatcacttattctaaatgtataagaagcagaaatctgtcttttcctttcctactgcccttcttaatgagcattttcttggcactggtctttccagactttcaacagttttatggaaaaacatatataaattgggaaaaatcatgttaatacattctgcttcatacaagaggctataaatgcaggactatcttagtaaatagctgccatttacaaaagatgctctttttttgttttaaaggagctcacatttcaaaatgtcattccacttcatatacatttctataaagcagacattaggggggcccttttgtatgatgaaatcgatcttagaatgtagggtgtaagacataatggcctttgactttttaaaaagccacctttaagacattatatttatttgaagtttgagggtcactaagcatcagagcttggcaagatgggataaccttgaatctaatgtttgagattgttagtccttaacctttcaattaaaagcctttgtttccagaagattagccaaatatttgaaagaaaccggcaatgttgaatcactccaaagggcaagtctgtgcaactgtcatactgcagagctctctgactctttgatgccatgtccctgtactcggatttgtcaccaccccaacctccacaccatcactcaaaacctgaaagtcctcccagtcccatctagacaaaacagagtgctatcgcccaccctaatccagtttgacccaccttttaacttttcccctggtataacccagcacaggccctatattatagccaagcagacatgaatatcttttacgcattgctattagttcctctttcctgaaagtactttctggctatgcacgttgccccagtctttgaagaactaaattaattatctcttttgttgtaaagcaaagacattaaagcatatgtattaggctggtgtgacttgcaggttgttgcttcactcctgtgcttcagcctcctctcctgtcaaatagggatgatactgtccaggattaaatgataatgtcttagcatcacatctggtatacaataaacattaggtaaatttaacttttaaaaatctaatattctgtgtttctaaggaacatgtccaggacattctcagtcctggattcccaaatctattttcctctactctcctttctccccagagcatttttcatcttctgaaagtctatactccacttatgttttgctccctgttagatagtaaaccatataagggaacaaatctttattttgctcactggtatatcccaagctctagaagaatgcctggcacttagtagggatgcagttttgattacatgaattaacttgctggtaaagatcactggaattcaggggcaaacttggtttctagtctctaaattgcaatggctttaagttgggatcaatcaccagacccccatgtgctctaaacaacaacaacaaaaaaggctgtcagtgtctgcaggcttttcaagttttgtcataatcatggtttcacagcaaaatctagggtagctagtggcctaccatttgcgtcatctctctggccatgcacaatataagggaaatgacatactcttaagagtcaaagacatttgtttttttcccccttaagggaatgttttggacccaggtgcaaatataaaatagcatttagggtaggaaaccgccccagctctgagagcgaatgacagactcggagaagggaactttattcacatctcacctctgataattaactctaaaagtagaactttgcttattttggaggtactatgcaaacttggtagtgttgtttctctcactgttttccttgatggaactaattgttcatatgcttctgtagtatgttaattaaggaacacattgctagttaaaaaaacactgcaactgtaaatatttttctgatttcacattttgctttactaaaaggctcctgtggagaatggaagggcttggtcattacttttggaggatttgtcttaacttccttgtctgcaatattgagtctttttaataaagattggattaggaacttaatagtggctttcaaagaagacttgtctttgcacagggctatagcgttcagctaaggaaacaaatgatcgaattgcattctctgatgctaaaaatgcctacataggaggactagaaaatagcacatgttaccatggagtggatcctccaaggcttcaaggaccaaatcaagttacttttatttaatgaccatagtaagaagcatacagagaggctacaaatggagcccctatctaatcacttgtgtccatcccacatttcccttaagtattgaaatggcaattgctaataggtacagagttttgcagcaggtcattagtggttcagagaacagaggagactgctctgaaagaaaataaaagctaatgaaacatcttgcttaagtattatgttttttatgaaccaaggaaacttcctttattatgactcattgatgttgacattcccgggtagactaaccagaaacctttttttagttcaatataaatatgagtatttcataaagggccaagaggtctcagctgacactcagctaagtgtcatttgataaagaaccattcctattagttcacctcatgctagaactataaaccagagtggtacccccatgattagttaacttaaagactggtgtgcattcaacaggcctggagaaagaagaacccttatcccatctgcttactctgggaaagtctcccagtgttaagtcagattttttaaccaaccttttgcctaaagtcaaacctggaccattaatgtgatatgtgtgacactgagggctaggcaggtatgtaaatgataaattttagtgaaaaggaaaaatactcaatacaatttctagccaatactctgcaaactagaaaacaatataattcatagttttttttttaagcaggttagacaatacagtaatctcaacattaacataaaccaaactcatttaacatggaaggagtaaagagctggccagtactagatgcactgtaaaattatctacagctggagatgattttgaataacacatattaaaagatacacacatagatctaataaatgagtctttacagcttagaaaaccagaaaaactcaattgtcctagtatataaatttttcatgtcaaataagttaagcccttagggaagtagcagtttatttggtaccctatgatttaatgatttgtttaattaatgcattgccttttaaaatatcccaacagagttgtttatcaggctagtagtataaggtttataagaaacaacatcttgcatgggctattacttcatattaatataaagttaagatactaattacttcaatcttacagattatgtccagatcaaaagtaaaaagaatatgatgttgcctttgggaaagaaaactagatttttctacgatcctcaaaatttgttaataccaaaatggttaataccatctcaagagcttatcttaaaaaatgtaaatggagtagtcaagacttgagcctttgaaactgttagctgatgacataaccaggtagcttttctaggatatcttgtttttatgcaactcatacaaagtttattttttccccttccccagccctggattaattagagatgactaaaatagatgaccaaagaaaacaatccagtggagtgtacatattagaaaatcttcaaagtccctctataaatcctagaataaactttctgaaatctgtacagattaaggtgaaacttgagatctgtccttgtgttcttggagtattacaaccaagaaagaagatgtgtgagctatttaatatatattccttcctaagaagtcttagttctccgaaacactatcattcactttaatcttatctgtagaggtcatctaaatgacttgtgaaaagtggtatagaaattgaattcctgaggtcttctctggattaggaacaatgtttaatggttggggtcaccaaggggtggttcttttctgaaatctctactagacacaaggttccttgaattatgcttccaaacttgctgagtgtgcttcctgatcccaaagatagatgtctagccatgtttgtgaaagggtagaccagtcaatggtgattacttacatgatactaacaggtgtgattttaggtatgtaaacttggatttatataaagaattcatgaaacaaaacctgtctcacttacagactttataagcaaaattctgatattaagtcggtgttttattgtattaataagtgaacctttctatgctcatctatttctgcagttactgaactgtatacagatatttcaatacattagaacactttgttgttcaatgtaaatgctccaattgtgcaacaactaatctgtttacttcagtataaagtagaatactgtcatttggaatttttacatccctcagtttaaaagtgcatttatttattcccacaaaacatatttgttccaatactatttcccaacagatgagagaataatgacagatgtgaactttagctcaagaatacttgtgcatttctgccaattttgttcatcttgtactcaatctgcagcagctttttagagtttttttttttttaataatcataagcacaatttcaagcaggtaggctaactattgggaggccttcttttggatctggaattcgactcatgtggtattattatatgatcacaaaaagcaagacaccaatttgacagattcacctctctcccttgtatacaaaaaacgaaaattacccaggggtttcttatccattaacctatctaatttgtccagtaaccaagaaataagcaaataaggaatatattcttactcgtagaagaactctcctggacttttaggaagcacagtctgatgttgtatattctaggaaacaaactgccaagattctgaccttcagcctgcttgaacactggtatcaagaggagagatggctggttgtcaggctgctggttctctgcaaacctgaaatttgacaaataaatatcaagtcactttttgtttttaaatgactcctttttccttcatctaatttgaaagcaaccatgtcttgtctaaaggaaattaactaaatcatgaagaaccattttttaaatgataatattttgagcacaccagatgacagtaaatagtaagcagtttcaaatcaaaacaaacatagctattcatagccactgggattagcaaggccaccaatattcctggagatgaagcctaactgccatgttggttgtggatgtcttccccaactcgaatagatcatatcagatgtggaaatgtgacccagcggcaagtctctcatggaaggttaatgccaactctatgggtaggttgaatatcaaaacaaaggacatgccacctagaacctagagacaacatattcgaattagattagttaaactgatcttgttttgagtctgcataactgtaagaagtgttttcatggttttgctctctatacagaaatgcaacaaaaaatacgttccacctgtctgtatacaatcactatgtacaccctagtttgctctgtgctgatttacaaggcagctggattcttcttccttcaaactctttaaacagtgtgtccttgaaacatgagttgcaagaaagggtacagcaacactcaagcaatggctttgaggattatataaatatggggcttttcctggaaagggaaaccacattgggattttatataatttagccaggctattaaagaagaaaccaaatatcaggcagtatttcttgcactggttttcggaagaggagaagtttaagattacctgcttgttttaaagtgccctggtgtggtatatatcataaaataattctactagtgtacgtagcccttcatttatagcttaatgtttatagcacagatgcttctaaattacatgctttttaaaaactcttctaacatccgcatagagtttcaagctgactactgtcatggcacttgaatagaaagtgggaagtattcaataattaggatttatatgcatatgcgtcataggtgaagtcacagagggacgtggatgaagaaatgattgtatcctgaagtccacgagtgaggtatgctgcacatctatgttgacttaattcaggattatttcatacggggatgagaatgcacaacctaatgttgtatattctaggaacaaactgccaagattatttgtatcattcattttaaaactagcatggtgggccgggcatggtggctcacgcctgtaatcccagcactttgggaggctgaggcaggagtttgagaccagcctggccaaaatggtgaaaccctgtctctactaaaaatacaaaaattagccaggcagtgtggcaagcacctgtagtcccgacttctcaggaggctgaggcaggaaaatcgcttgaacctgggaggcggaggttgcagtgagctgagatcgcgcctctgcactccagcgtgggcaacagagcgagactccgtcacaaacagaacaaacaaacaaaaaacctagcatggaaataggaagaggagttatttttggtagaaatatctaacctagcttagaaaggacagacatgaaaacagtaaaacatttgctgggtcagtttgggtcagtatatgatgagggaggattgtagtaaaagctatgaatggtgtgagtgcgttgcctctgagtcttaactttttgactaccttttcctgccaggatcaagcataatacattgtatatttagatgccaaatttaaagtaaaactcatgcatttactgtgttttgtatcagttccagagtgcttctcttcaagtcactgccccaaagacactgcaatagaaaaattctagaggtttctatgtcagtagtagttttttttaatattaaaactctaatatttttcatgtaagttgttcgttctttagaaaattgtatgcccttggatttaggatgggagggaagcagaatgaaatataatatcctactttaccatctaatgatacaaaataaagttcttctaaattcaaattttaaaacgggtttattctattgacccattccagttgcctatgaacactttagctttctaaaatcttcttccaaaagtgctttcttggtatatgttctgattaatatcacttcaaaactagaaataccaagccttcctggtcttggggtctcctatgagggtcccttcctgctgttgtcaccatggtgtgaagtcttcagcctcatcacagtcacctagtgcaagtgactgggctaccaccaaaacctggtgggttttagccactgaagaaagtgctctggtgagcggggcaggtttggccatctctggtcctgcagtagtgtctccaggtatgggaagtgctcagtagagttccgccatgtccctacaggccctctggtcacacggctctttcagtgtgataatgcatgccacccaccagccactgcaccaaggcatgcccatgctgcccgagtctgcttggctgggtcagattggacacctaatgcttgtgccaggtctttagttaagactgcctaccttcctgttatgggaattcttcccttgggccctctccactgtgtcagaccacttcagcccattgatcatttcccagaagtgcctcagcttactctatagacttgttcaccagcttcccagatacctttgagctttaaagcctaaagtatatgggaaagagtagcctttgccaaactcttccaaccccataataaagccatattatcctttttcccagaacaatggtttcataatagcttttcctcagaagtaatgggaatcactcatggcttcttccataggtgacttgatatttctctaagtagaaagagaagcagctagtgaggtggttcgagatgacatttaatatcacaactctgggctcaaggttgtagtcattaccttgccaatctctcttccctacatcacttcccagggacaagtacaaaatggagaacagcacataaggaaagacataccatataaggaaagaattatgcatgggcataggtgcctagcaacctccaaatacagagctctgcaaaagctacgttgcagcatgctatgcgctagactgtaattccccattgtcttttccttgtcaagttgtgcccacaacattgtcctacccagcttgcttgagatatatgaaactcacgtaccaaatggtccctgatgtaaagcaggtcatagcccaaatgattcagtgccagcaatgtaaggcaatgacagaaatgtgatttttaacctctgtagtttccctgaagtttcaatgtcacttcctttcctttgtagaagtgagttaaaggagaaagttggattcctgttctgtgtagtctaagccagaggaggttatacttgagaactggggtggaatatgtttcttctcccacattaaagctgaaatgggtgtatactctctaatgccaattaattcaacctcaagcctcatatgtccatattcacaaaaattccacgtgatcaaaagaccaaaaggacattctgacactgctctctttcttagaagctgaataagtgtaaagagggattctagaatcaattgtctctgcatgtctgtgttcatacaagcatattaacttacacccagctttgccgagaggccagaacatgttctcactgtgaagactacactttctattttttccaactttagtgcagttaagtgttcaaactaatagcccttgtgctgaaacaacaaagcaaaaatacaattgcaaaattgatcataaccttaatacttctgttcagcttgtgaacactttcagacacttgccgtgaattgggtggcactgccccgtctaaaggccaagtgcagtggctcatgcctgtaatcccagcactttgggaggccgaggcgggtggattgcctaaggccaggagttcgagaccagcctggccaacatagtgagaccctgtctctactaaaaacgcaaaaattagctgggcctagtggtgggcacctgtagtcccagctacttgggaggttgaggcaggggaatcgcttgaacccgggaggtggaggttgcagtgagctgagatcatgccactgcactccatcctgggagacagagcaagactctgtctcaaaaaaaaaacccaaaaaccaaaatccaaaaacaaagaatgtgcccttatttggatgcataaagcttctttgaagtttaaactcttctaaacgttctttatagaggggactgtttctttcttttttttttttttttagataataatacatgcatttattttttatttatttatttttttaattttactttttctttttttttattatactttaagttttagggtacatgtgcacaatgtgcaggttagttacgtatgtatacatgtgccatgttggtgtgccgcacccatcaactcgtcatttaacattaggtatatctcctaatgctatccctcccccctccccccaccccacaacagaccctggtgtgtgatgttccccttcctgtgtccatgtgctctcattgttcaattcgcacctatgagtgagaacattgactcagcaatcccattactgggtatatacccaaaggattataaatcatgctgctataaagacacatgcacacgtatgtttattgtggcactattcacaatagcagagacttggaaccaagccaaatgtccaacaatgatagactggattaagaaaatgtggcacatacaccatggaatactatgcagccataaaaaatgatgagttaatgtcctttgtacggacatggatgaagctagcaaccatcattctcagcaaactatcgcaaggagaggactgtttcttatgctccaataagagacattcttaataacaagttattaaaaaaaacaaaatgggtagaggtgggtacaaaattaggatgggttataatgagtccagagtattgaaagttgccaattcaagagcttagacttcctatcatgctcaaaaaaaaaaaaaaaaattccaaaaaaactaaaactaaaaggccaaacactgaatagtagagaatgtaccgaaataaatttaaatgctttgatctgcaagtctcagacctaggcaaagcagccaaatcaatattaatgagacagtttgaccaagtaactcctgctacctaggcaaaaaggaatctagtgacaatgtataatgagaccatgtaagatcctttttctattttgattcagaaaacatctataaaataccatgttcaaattaccctgctaagctatcttcttgttcttttgcttggtatatctgctaaatggaaggcattcttggttcagtccccatgtaatgggctttgtacatcctgtttttaaaaaatggtttttaaaaacaaacacaggtaatctctaggaataaggcattacagtctcatgctagatctttcctggtgccagctttgtcccctccagctatttcacaattagacaagtcaaactctctttcttgccctcagttttctaatcattataataaaatgatgtggccaaattattctctatttttcttccagctcaagtctaacccacttggtatttctttaagcagataaagcgttgttaaagtaaaccatcgcacctcacataggtcagtatattgaaatgatttaggaatctttaaaatatattgatacctgggtctctatgcccagagactgtgatctaatttatctgggaatgccatgaatatcaatgttttaagaattccacagtaaaattttcccagatgatgtgaagcagagcttctaaactgtccgtgataatgacgtaggcatgaattttaactcaggattcattggaacaggcatctctgggtaacttagagtagattttgttcccagagtctgtttctatcagaacccaacttttgtaggctcagaaggcagagctgagcaggaggtggctcttacactggcaaaccatctcacttttccacctgggctttactagttaaaatactaggctgggtgcagtgggtcaagcctgtaattacaacattttgagaggccaaggcagatggatcacctgaggtcaggagttcaagatcagcctggacaacatggtgaaaccctgtctctactaaaaatacaaaaaattggccaggtgtggtggctgatgcctgtaatctcagctgtttgggagggtgaggcaggagaatcacttgaacccaggaggtggaggttttagtgagctgagattgcaccactgcactccagcctgggcaacaagagcaaaactctgtctcagaataaataaataaataaagtattacaccattccacctttccacttattagtcatttgagcataggttcttactgttctaaaagtgtttaaacacttactgtggaaatgcaatgttggaaagagcacaagactacacaacacatagcttctgtgacctagctttggtttaatagtagctactgatatggtttggctttgtctccacccaaatcttatcttgaactgtggctcccataattcccatgtattgtgggagggacctggtgggaggtaattgaatcatgggggcagtttcccccatactgttctcttggtagtgaataagtctcatgaggtctgatggttttaaaaggggtttcccttttcgattggctgtctttcttgtctgccaccatgtaagacgtgcctttcaccttccaccacgattgtgaggcctccccagctacgtggaactgtgagtccgttaaacctctttttctttataaattaccgagtctcaaaaatacaaaaaattagccaggcatgatggcaggcgcctgtagtcccagctacttgggaggctgaggcaggggaatggcgtgaacccggcaggcggagcttgcagtgagccgagatcgcaccactgcactccagcctgggcgacagagcaagactccgtctcaaaaataaataaataaataaataaataaataaataaataacccagtctcaggtatgtctttaacagcagtgtgagaacagactaatacagctaccatttgttaagcactttctaagccaggtgcagctgtcgctatgtaagttcttactgattttttttctaatagctcagcaaactatattctcattttaccaatgaagaaatgaacattagataaattgtctcaagccacagagccaggaaatgatgaatcctgggtgggtgggactcacaagcctgagctattagctgctatgctatcccacctctacccaaagttaactgtttgatagaatcttaactctggtctgacttggttccaaaaacagggaaagcatcttggttcaagatttactaagtcctctaagtcctgccatatcattttcaaagattaaaggcaatgatacctcctcgctgtaaatgcataacttgtggatagctcattgactcgggcttgttttgttagtgaggcccctacagtagtgtcagcatttacaagaaaatcttctaaggactccttttcagtatgcattagcatagtctcattcctcagtgaaacaggctgtaaaaatcttactgtctgctcagtttggtctttgcagagcagaagagccttcctaaaagcataagaatccaaaaaagcagttaaaggaaggatttgcataaagtatcagaaacagtctaactttgctacagcatcgctggtaatgacccctattcttaaagagctactttgaagatagcagtgaaggctgtttgctgccctcttggaccccgaggtctgtcttagaggttaatatttcacatgttgtcctaattccgcactttagctgaggcaggcagaaagttcaaagaaacaaggaagcacattctctgtccagtacaaagtactggacattctaaacaaatatgtttatgttgctttcttcttgagtctccttaattcctttccctgtgtctattatatgtggcttcttgctaaaaattaatggtgtgttaatgtcagtgggatgatgactttttgaaagtagcttataaaatccaggttaaaatcagtgggattcaagaaaagacaagagagacagtatatataagagaagagaaaacacagactatgctcactttgagcccaatggcttatggcggattgattttctgttgctgtgtccatttcattattcataaaatagagacacattcagccggatgcggtggctcacacctataatcccagcactctgggaggccgaggcaggacctgagggaggtcaggagctcgagaccagcctggccaacatggtgaaaccctgtctctactaaaaatacaaaaacttagccaggcatggtggtgggtggctgtaatcccagctactcgggaggctgaggaaggagaatggcttgaacctgggaggcagaggttgcagtaagccgagattgcgccactgcactccagcctgggcaacaagagtgaaactctatctcaagaaaaaaaaaaaaagagagacacattctgtttcataggcctttcggaataagtgttcttagtggttggtatactaggtgtttgtcccattccccttaatgttaaaaataaattccctaccatctgttgaatggggctaccactaagtccttaactcaagttattccttttaccagcattttgagactggcaaagcacttttcctgcctgctctgtataattagggtaagaaggtaggcttgggagtcacaggggaggatggttgacacttgtattatgatattgcttcaaaaccttggaatcattaagtagtaccattgctgatgccaacacattcctactggtagaaaggataaggatatataagaagtgccaaccaactttacccctataaagcctagactaatcattgtccaccatgctggcaattgaaggattcaaaacactagacattttatatgaatcactaaggactaagcaacagctgatttttattattgcaaagcccatagtcattctaagatgactcatgcagtcttccagaataaatttctcagagccttctcagaaaccaggagagatgttgcaagctccagaatctcttgcagtcatctgatgctagtcccacagaagggggaagtctctgcattctttcagggagatttgcattaagtccaaaatccaagttagagatcttcacttaaatggaagctaattttattcatatagcagagtttcctttacagctttctgttctatctgaggccttaaaaaggagtcaggactataagataactttagatcttcctttgtttttacatgtgtcatcttacttctcttttcaatcttctaatgaaggaaacagccagtccctgagaaccaggataacaaactagctatttttagatggggaactgtgcttgtgagcctttttatatgtttttgagctttcatttgtaatccttgccttgtgataacaccccttgggtgtatttcctgactaattttgcactttttgaactgaagggacctgagactacacccaacgagtgagaaaattgtatacttcctccttgtgctgcactcacttgcttccctttgtaagaaatttttaccatcctagagctttcaaacagaccccattgcttaacataagctagacactttcttcaacagagccccagtttggaaaggtaatcaaaggaattaactaggggacttttggtcctcagatcccttttctaggcccaatcccttttttaaattcaactcattaaaaaccctgctaaaagttttatggatgcaagtgacaatattcaaatgcattacatttgaatattgactattaagtttaaaccaattattctctacagatggatctaagtctgtaagtgagctgccttctacccactgcatgttaaatgataacttgcctatttgacaagtctatgatggggacgtgctctttaaaccttgggagaaatgtgaattatcactctggtgtatgcataactggatgtacacttttgttaaaatcttgcaataagtcttgaacattttttttgtaaaggggtttgtagtcttggggcctgtaagcagagtctaccttctgatcatttcaggaagtagagatagatatattttcaattgtatggcctacaatggagacttacccttggctattgcaactcaacatacacatccattttcttcagggaatttatattacagaaacttttcctccttatttttttcttccttgtcccttggaattgctcatacccaaatggcgaaaggatatagtcaaaggaaatcaattacctttaaagcaattccaatgctatgaaaagctgtatttaaatatctgaacagagaaatttttgctataaaaacttacagcaaggtaatgccactcaccttagaatccttccatttggcccagtctgccaacgctagattcgatacctggtcttcagctacgtcttgtgttacttttatgactaaacccagatgccaccgttccctcccccaaaacccctcaaagtgctttgtggcacttctcaaattcttttaaaatagtctcatgtaagaatacaaattgccaaatttaatgagctaagtcttttcatgtcagaaataataccttgcagtgaagtatgatatccggcttcaaagatgggcaacagactcttaagcccaggtcactttttcagccagtgattctaacccagttctgggccatcttgctgctgctatcaacacatgcattgatgaactcaacataatactgacctaagcaagacagatctgaaggtatagtcacacacacttcaattgcctcccatgaagaaaatagaatgtattctgttttggaatatattgttgcagttcttgttctgggcctagaaagttaaaagtagatatcgaagtatataaatatagccttgaaagccaaaataatatggtttttaaaagcatataaggattaatattcaagtgaaacacttgaatctgccacatttagggtacccttaaagaatagttttttgatctggaaaatcaaaacagattagccttaccattgtgtcagttggagttcagtccacaccagttattttaaaagattttaatgttaagcattaattcccactcgaatactaaccaggcctgaccctgcttagcttccaaaatcaggcttgttcatggttgtatggccgcagatattaagtgttaactaggtataagttgttagctagaaaactgagagagtaagaagagaagatcaagtcatcactgggtaagtaaactacagaaagcagctaccacctctagggctgaggggacaaagttaagacattggaaccatcaaagtttataaagcttgcaggagggggtctcatggtgctgatactgaggcctctgagaagggagtactgcttagctagtactggagtccctgtgctctgagggcctgggacctgttggcctggagagagtatgccagagggctgatgctgatgtctccaggacaggcatgatgagactagttctgcaagtgttaaaactggattcaggggctgttttaggaagaaactcttgctgctggagtgaagaagttctactagagtcacactcccaggagtctcaagtcataaggaagtccatgtggagcaagcagacatgtccgagtcccttcaccagcttggcagtttccctccagcgcaccttactggcagagccaacatgcagccagcaggcaaagcaggaatgtttgcacagtctagctctggcttcactaaccggagatagaggtggttctgaagctgagacaacttaaatggcacagatcacccctccagctactcagcatccacatacacccttccacacctttcaacttttcctctgacagccacacaagtgtttccatctaaaaaggtgcaactgtctttcattcagagaaagatgttctcaccctctccccaaactgggaagctgcaaagaccccataggcatcacattcatttctggaaaacggttactgtctttgggctacattaaccacccctagacttcagttgcagtcccatctgaataattcactgcctaaagacaaaattgtacatttaacttcaaaaatacttgcattaaaagagaagatagagagataagaaaataggtaatacataccagtgtatacacataacaagcaaggaagaaaatacgcatagctacaactgccctcattaccatctgcatgaatgccatctatatcccagacattgagaaatgagtctcctacattcaaggagattatagtccagtgtgtgggcagacaagcaaatagacttgtgtgtaaaccatgcaatggacatgtgtatttcaagaggactacgtgaagctgtgctggaatacagcttctcagctgagatttgtcactgcagtgttgaggaactctggtttggggccagacagtctgggttacaaacctggttctaccacttagcaggtatgtcgttttaaatatctttgccttcactttgggaggctgagtcaggcggatcacaaggtcaggagcttgagaccagcctgaccaacatggtgaaactccgtctctactgaaaatacaaaacttagccgggcgtagtgcccctcacctgtaatcccaatcccagctactcaggaagccgaggcaggagaatcgcttgaacccgggaggtggaggttgcagtgggccgaaatcgtgccactgcactccagcctgggcgacacagcaagactccgtctcaaaaaaaaaaaaaaaaaaaaaaagaatatctgtgtcttagccttccctctggaaaatgaaatatgatacagtaatactcacaggactactatgaatcttttaaagttatacaattaaaaggttaatagtgcctggttcccacctaagtcctgagttaagaatggctttgagtctcctactgtgtaagactttcatctgtaaacagactgtctccctggttgccaaccagccaggtgtctttgagcaaaattaactactaaatctccaaatgaagcaattcagataacattactcatacatagattgcatgaatgtatgtatttaaagactgttcagattataaagacttttaaaactcacagtgggagaaattaagtactgacccctatgaaaacatgttgacatctgtaaacaagctaagtgcaatttaaattgagtaaaaacttgagacttactttttatttagatattctttaagtatctaacaaacgacagttattcccatgtggtgggcttggtccttcagttacaatgttcacttaaatgggtggtataggcacggaatgaagagggcttttgttgaaggcagggttgtggaggggttagtgtgccagcccacaggttgtcttaacacgattacaaaacaatgaatagcttttctttgcctttggtcatcagtcaatgtagaaagttaatctactcgccctagctctctctacagcatatagaaacattggctcctgggaagtgagagaaccttttggaaagttagctcacttctgcgtggttacaatgactgcattttcctgtttctcctactatgatacattgtgggtagggcagaggttgtgagagcacatgacagactgtttggagtatggtgatgctgaataatagcataaaaatgtactagattaattgcacaattggaaccccctcaatccattatttccctgatacaaataagtgttaatggcaaaaaaggatgtgttttatagtgcttggataaccctggggatcatatgcagaatcctaatacttaaaacaaatttatcaatgtgaataagatacaggtcataactctactctagtcactgcctttatagttaagcaattttccgaagaactgaaatttataatgcccaatctcaaatggcatttgcagtcttaccaggcttaacattcaatttatttctgttttgcaataatgcctagcaagttttcgatccctatctttaatacttgctttttatgtgaaagttctaataaaaactgcttagctagataatcattaaatgttaccagatatcaagtgcttaaagaaaaaactaataggcacacatgttccattttggaaactacaaaggaaacactcctacccactcccctgctttcagtcttcagtctaatacagcaggagaaggaacaaaatgagtccaaagaactacaaaagaaagtcactagttgtaagcctattctggcataaagtctgggtctgctgtgttctgatctcaatatgcctctaaactctgcctacaggtgtctgtgggaggttatgtttatttgagacttctccatcgggatcgcctggtgtcaccaagtgtccactggtactgaggtttgctgcctgccttcttgccatgtctaacgaagtagaaacaagtgcaaccaatggtcagcccgaccaacaggccgcaccaaaagcaccctcaaagaaggaaaaaaagaaaggtatggagaaatccacttgaagccaaggaagggagctagagatggttacccctggagaaatgtgagattcagaataaagtaagggctggctctgatcttccttcaacctcagcttagtctcatgttctcctaataggaaagttgtaccttgggagaagagactggttcatctcacgtgtaataagacatctctggaaacctgcgattatacccacttaagtccagttgggaaacagtcatggcatcttgttcagttaataatgcagtcgttaattattatatggttatcattcagttatttatttaccatttgattttactgaactcattgggaatgggactacacagaccttgtaaaaggagcaaaagacattataaagatgggataattatcttaataattttcaagagaacttaggcataattcctttctgccttattgataatttaaaatgttggtaaattgcttggcagcttatttttcttacattaaaaatacatatattatcatccttatattcctttaaagacttaaaaaaaactatgatgaaaaatgtccccaactcccacctcccatattcccatacgtttcccataacgctgtcaattttgtacttctaacagtttattttctccccacctcaactccatacacagttgattgtggaacatgattttgctcaaaggaagtaagaataagacaggacagaatattacatacatgatcagttgtagtataatcaggatttatattacttaaattttggagagtctagagcatatttggtcataattagaactagcattcttcatcctgtattcctttcttttctcaggccctgaaaagacagatgaatatctcttagcaaggttcaaaggcgatggtgtaaaatataaggccaagctgattggcattgatgatgtgccagatgcaagaggggataaaatgagccaagactctatgatgaaactaaaggtaaaagggaaatgaatgctttatctgtatattaagcaaaagtccaagagagggaattatattagaagctcttgttgacctattgttcaattacttgaaaactgcttttaatcacattatccatcagtagtgccccattttctgagaaaccgtgagtgtttgcatatttggagggatgtcctagatacctaattttatcaagtataataggactctagatgccttttccttctggcaagctcaacattaggacgaaccaagcgtattcctatttctattcctataaaagctgtgtgcaaatatttgcattgcttgtcttactatatgtggagagcacggaatatcctgttttagacctgggaattgttctgataaaattgaggattctacttagacattggtgttccttagcgctagcctttctgttttttgaatttaaaaatttagtactatggcactatgtgaaactgactgaataaataatacttgttcaatagttcaaggcctagaagaaacatctctaaagatcttctagttgagctttaccagtgactattctgaggccaagagaattagagtgacttgtccgagttcgcacagctaactaagggatgccctggttcaacgtcttctatgccgtcttgctgtcccggatgaaaagtgccgaatcctctcatcgatggcagatcaagtcgaaaacaaagctgactgactttgaaaattttaatattaaaaccattgtaggatgtttttaaaaattcaacttctcttgtttttccaccctcatcagggaatggcggcagctggtcggtctcagggacaacacaaacaaaggatctgggtcaacatttccctttctgggataaaaataattgatgagaaaactggggtaagaattcacatttgctgatacctctctgaccacctgagtctgaccaacaatttgctacttgaatttcggctccccttcttcgttctcaaagttctgtggggaacaaatatatcatatattacatctccagaagtaacaggcagaaaacagaataggaggtaaaagtcaagatacttgattttgaatttgtgttctataataaatgtgaatctaagtctgttaagtctgttaataggcttagattcacattatgtctataatatataaatatatatatttttgaaattaaataaatatatataatttatataatatacaaatatacattaaaatataaatacatatataatttataaagtaaaacttctatatatatatatttttttttttttttttgacctcgggtatacagaactagattaattttaacccctagtttgtgacacttttatgtattgcttacatgtgaacttaccggctaacctaaagctagaacctcacccataacacatctacctctttttcatttcttttttccctgccttctcacctcacagatgtaaccttgtttttgttggttcctgttgttctattacttgtgaacagtcttacttattttgccttgtttttaagccttatcagaaagctatttatcatacatcaagtcttctgtgattttttttctgtactcaatgtaacatcataagactcatgttttttaaaatgttgtgtgtggctcattttcattgctataaaatactctctcgcatcacgatactgtgaggagacctccagttactattcatccctttctagagtgcccattatctaccatgcaaacctagggccctggcaccctagtggaccccactcagcctgctagtgctggggtcctcaggcaccactctctttatcagtcgcctttatctgtcaactcttattttcccaagcccatcagagaaaggtggcatgtttctctcacccttctgtgtctcctcaaactttctaagatactctaagatatcttagacattcaggacaaaaagccaagacacactctgccacctacaaatatccctaaagagttcaaccttgttaactgcttgaaaggatcaagaaaaaggagggaaaaatagaagaaaagacactaagccaatacagtccccaccccttataattcctggttactgatgtagtcattatgtcattaacatactgtagttattactacattatgttactatgtattaggctgtctaggtgaggctgagaaacacttgatgacagtatttggtatcctccagaatatactgggaatacggttccaataacacataggatggttcctcggccactctgagccatcgtcaatgaatccctgtgaacactcctctagcttagttatgctgttcttttaagtttgtctttgagttgggaaagtagacctatttggcttggcttaagggctaaatgtctcctcttcacttggtcttctaatcctcagtccttcctggctatgtggcatcatgtctttaaagcagggagagtaaagtatcaatattttaagaaggaacattcttcccacttacgttttctattcttctttcttttgagccctttctagaaagagtaatgctctagccttcaaccagaaatgaaaagtctatcttcaaatggtttaaacttttcatatatgccttcatatatgtgtctgaggcttcggtgtgctagcctgcaaatagattctagttttcttaataaattactctttatgttcttttttaaggtaatagagcatgaacatccagtaaataagatttctttcattgcccgtgatgtgacagacaaccgggcatttggttacgtgtgtggaggagaaggccagcatcagttttttgccataaaaaccgggcaacaggtgagctctaagtcttgacatagacctggggacttgtcctctgtggacattggagtgtctgtcactcaactaaaagatttactggaaataattggatgtaagagggctaaataataattccgagaatgactatttttattggcctatggaatcttttaaaaatgtcattgatagctatgcactgctgtgtgccacaggattgtgagaatggaccttcttataaagtgaatactgacttcacaacagtggtgaattattctcaggaaccttaaaggacttcaaatatgatcatgatacctcttgttttgtctaaatacttattaaccctgctgtcttttatatacctaagggtgaggattgggttggtggtgatcccctataagccagcagagggtagtaaggcgttttaagattaaaaaaaaaatcccagtatgaattataattgatagcagacaaaggaaataaaatactaaaattaaaatacggataacagtgctttcccttactgcaggctgaaccattagttgttgatcttaaagacctttttcaagttatctataatgtaaagaaaaaggaagaagaaaagaaaaaggcaagtactacctgattaaggctctattaaatttaaaactggctgggcatggtggctcacacctataatcccagcacttcgggaggcagaggtgggtggatcacctgaggtcaggagttcgagaccagcctggccaacatggcgaaacctcatcactactaaaactacaaaaattagccaggggtggtggtgggcacctgtaatcccagctacttgggcgtctgaagcaaggagaatcacttgaacccgggaggcagaggttgcagtcagccgagatggtgccactgcactccagcctgggcgacagaacgagactctgtctcaaacaaacaaacttaaaactgtactcaggactatgtttaatattatatataaatatggtctatctgaaaatttggcttctatatgtattgtctattcttcccaatagggcaatggatacatttttatggttaggcacttctaatctgcactccctggcttttattttttttctctctatgagattcatattaattctaggaaatatacaggacaaccaagtttaaatccagtaactctactcaaaccttatattgatatgaaaaggggaggggaacggagggcagaaataatatacaagacttattcttgccttatgcctgtgaaccataggcatacttgtttgtgtatttaactccctttcactatgaatatgaagatcactgaatatgtatctttctttttagatagaggaagccagcaaagcagttgaggtaaaattgcatctttacttcttgttaatcatgtgtgtgacatgcgtaagcccctgttttctacctgcccaaccactctcgccacctcgcttattactatgtgtttatgacttctctgatcatgaaagatgtttagttaaaagatgataccaaaaccattgctgcttagcagactaatagagtggacaaatacattttatagacaaagctcaactaaatccttaaatatttgctatcttttcagaatgggagtgaggccctaatgattctagatgaccaaactaacaaactgaaatcggtatgtattaatatgtgacgtttgacagttcttacttatctgaacatgggttctacttcctgtagatgttgctgataccaaatctgtattgaatctatatgaaaatccaattgagacaactgtttttcaaaatattagtgtaacatctatgtcaatatacaaaagtagtcaaaaaaagattagaaaagtaatctttttagtagccacacctgaatctaatctaatactttttaaggatgtggacaagatagatttgctttgagacatgtctacacttcctgacctaaacagcttaatatgaaatctattagttaaatggaaattaaattgtgacagctactttcctaaactttaggaaacaaatgattacaatatacgaagtaatcttttttagtagacacatctgaatctaatccaaatacttttttaagggtgttgaccagatggatttgtttggggacatgtctacacctcctgacctaaatagtccaacagtaagtgtttgtttttaaatttgcaatgtaataaaatgacatctataactcaaattggcaataaccagaaatcttaagcatctcattgaaacttggaaggtgactgttgatttttgcaaatgaagtgtcaatggtttttagaataaatgtgaatcttaagtcaccatgggaacctatccacactaattcagttatattaatattgcttacagattaaacctgaacaataagtcagcaatgtagtccttcttggtatcacttaggattagaaggaggaggtgaataatagtccttgaataagcctacttgaagaaagtatgactgttagatggttaatcataaagcctcctggcctcttcatttcttttgcattctgtctgttgcaatttagcagcataaatttggtgtgaagtaagatttaaaacaaacaagtggctcagttatattccaccaaagcttgtccttgttagaaagctgcccattctcataggattttataccatatccagtctgctcaatattgaatgatctgtaacaaccctgtaagaacagaacagtattttcctttataaattaaaaaaaaatggtggttcagggaaaaaaaagaagaaaaaaaaataaaaaggaaagaggtccagattcaagacttaggcccaagtcttcagaccttccaaaacatacctctaatgaaaatgtccatgacattttgaatgacttcttgcaacttcttttatttatgtaacagtttcctgagcacctgctatttgcaaggcatagcagtaagatgcacaacatcaatgacatcatggaatttactctccggcagggagaccaacattaaaactaatcacatcgttagtaattgatgttactacagggtatttatctagttcagattcaggtaatgcttctgcaggagtgagtttctagatttgaacataaaagatgagaaggcaataaacagacaaaaagagaattagtctagaataatggggggaaatgtctagaaaggactctcttgtatcaggaaattatcatggaagcctatgtgaccaaggttacaggagttgaagcaatggatcaaagattggataaaattctcccttcagacttctgcagagaatttgaggcctgtgaatccttactgcataaaactttcaggtcaaatgagatggagaggagcagggacttcatgcattcttctctgaccctaaccatatgagtatcacaatgcatggtagcattctaaaatgcctttaagagagaagcctgtttaatattcattttagcagtgagccctaactcacttgcctatagaacctttcattcttcataatttttgttatagttctgaggataaactttttaaagtactagactagattatcctgacaggtccatcctaactctgaggtccttttgatttgtagtcaactttgtgctctcctccattagtgatgttttctcaaataaatcagtatctgaacacttacttcccaagtataaatgacattcaaacaagtaatattcaaagagagcaaagcactcaagatatgaagtggaattccactggaataggcaaggaagtactgcctatataatctacttctgtagacttctagaatgttctaaaaaaggaaatggaaaacaacatggataatcttcagtctcatttttattagactttatgaagtctaagaattttttatttataggaattcaagttttagttaaactaacaataaagtaataaataccatcaaaatatatactctctgataaccaaaagaaggctaacagatctaattatgtgctggttaggctttgacatgttcttatctattgactctatagtcataggtcaaaaatagatttatctctacttggtaaagccagcatgtttaaaaatattcaactctttcaacaattgctctgaaatatgtaaagagagaaagaaatctaaattacctagactttattattggtcctagatggttgtcactcccctcaaatttatacagaaaagttttatgagtttcaaataatgctcatgttgcaaactatgtggtatcccctagaacagaatttttattggcaagccccttgagcattatccttccacactgcatctcaaaaaaggaaaagaaagaaaaacataaaaacccatgttctgcaactttaacaaccacttgaaagcacagttactatggaaagaatataagacatgatctgtgatcaaggagattaaatctggtacaagggatgggatcaggatacaaagcaggagtgtcacttatgtccttgtgtacatgccataagataacacgggtgggcacagggcaagtgcagacagaaaaatcgatgctaaaagctttgtaaagaatctgaatttgagttgggtctttgaagtgtgtaggaaaatagatcatagttgggctagaaacaacgtgggtcttattgtggatcatttggaaatttggcctaaggaggtttattttaatatagggagccagcagtaagccacttaaggctttgagtagagaagtcctcagtctgacaaactggaatggttaggtgagattagccacccagagaagagctaggctatggaactcaggatttatgtccgattactggagctccctacgagcaggttctgtaacgcactgccgtgtctccagtgcgtgcggctcaggtgctcaaacagtggccaactggaggcagtgttgacagttcgacaaagaatgaatgaggcgctgaccaagtgggtggatgaggagtctttgggctctcagttgtagtctgtgaactacacttttaatcttggattaataacaaacccagcctgaggagagccttatacattttacttatagggtgactattcagaagtctaacattgtggctcctgtttggtgtcctaagaacttcttctgaagtatttgaaaacgagaactctaccagctgtgaacactcaactgttctaacccagaggtggctcaaaacaaataaataaatattgaaatcacaagcttttgtaatacattttatcctaccttttgattgtataaagatccctagattaatagctcttccaatccatttctctgattaaatttttttttaattataagctctttcttgtgacaaattcttcttttataaagagaaagcctggctttggcttataaaaactgtatttttatgcctcacagtaaaggaatccaaaagatagattaccatttaggtctgattttgctgtctcttttgtggccatgaaataggacttaaactttctaaacaattgggtatttttttttcttttaaaagccaaggagttctatttgaacccttttgtatttactagtttgcaaattttatattcccttgaagttgtttattttccccaatgatcaaaatatttagtattctgctcagggtaatgcaagataactactataacttgcacttcagcaaggcattttttatcatttatattcttctctgggtagcatagttaagtatttaatggatcaaagtcaagcagaaggaagtgatgtcagtatgaaagttctgttctaggatgagttataattctgtcttttactggaataaagacatgtcggattcatcaaatttactgcttttaagctgagaattttttatcaaacagttgaaaatccaaaaaattaacacaccagagaaatgatagagaggggatagaattagtagagctacatatttgatatgtctttcaaattaactcttaaacccatgtctctaccttgtacaatagtccccctttatctgcagtttcactttctgaaattaagtctgtggtcaaccttggtctgaaaataagtgagtacggtacaatataatattttgagagaagagagacagagagaccacattcaaataacttttattacagcatattgttataatcattctattttattacttgttaatctcttattgtgcctaattgataaattaaactttatcatgtgtatgtatatgagaaaaatactgtatataggttttggcactatgtgccatttcagacatccactgtgggccttggaacatattccctgaggataaggagggactactgtatataaattaaagatcagttgttggttgactttaaccactaaatagatgagattactgtcacaacacaggcaactctaagcaatgttatgaaaagatgtacaaataggagatcttaatgtgtgattgactaaattagatcagtattgagtgtctctttcagaggacatagacaaaaagggtaagcccagaggagagactgggatgatgaggatgagatcctacttgactatcagcttcagcaagagccttaaatattaagagacatacctgaaggccgtgatataaaagaaaagcctctctcccacctctagaggaaagaactggaccgattttagggaaatgcatttgatcttaaatttcatcacagccagaactataaaatatgaatgtattagtcgatgaattttctcatttagagagatgatcctacatgactctgggggtacaatagagaggactgtatgtgtataggtaggaagctgagctaagcttctgaaatcacttactttcaagctcaacatactttgataatcatttatagtgactcacaatcaattccctttaagactttcaaagtcacaaattgaaacaatgctcataatgaattaagccagtctgtatgtgtgaaccagggtgagcagagacatgaagtaagcaacagtaagatttcacctaatgaggttgagacttaaataaaagggcatgatattggggaggaatagaaaggacctagtctatagctagggagtaatggactacgggggttgatggaaggaggtaatgatcaaccgatttatcaagaccaaattcaaatggaaattctgataatcctagtcatcttatgtaattttctcatttgaagtcacaacatggactaacactttctttttttttctttccaaatgtgataggaaagcaaagatatcctgttagtggatctaaactctgaaatcgacaccaatcagaattctttaagagaaaatccattcttaacaaacggcatcacctcctgttctcttcctcgaccaacgcctcaggcatccttcttgcctgaaaatgccttttctgccaatctcaacttctttcccacccctaatcctgatcctttccgtgacgatcctttcacacagccagaccaatcgacaccttcttcgtttgattctctcaaatctccagatcagaagaaagagaattcgagtagctcgtctactccgctgagtaatgggcccctgaatggtgatgttgactactttggtcagcaatttgaccagatctctaaccggactggcaaacaggaagctcaggcaggcccatggcccttttcaagttcgcaaacccagccagcagtgagaactcaaaatggggtatctgaaagagaacagaacggcttctctgtcaaatcctccccgaacccttttgtgggaagccctcccaaaggactgtccatacagaatggcgtaaagcaggacttggaaagctctgtccagtcctcaccacatgactccatagccattatcccacctccacaaagtaccaaaccaggaagaggcagaaggactgctaaggtgaattgtcttctccacatatccattagcagagtgcatgttcggtaccaaagggtggtgtgatgcaagctctctttcctgctgctctcgtagtttcctgtgttgctgtgaaatagaaggtgggataaggcactttggttctccaggagtactttcctctaactgccaccgtttttaagcttctcagcagtgtttttcacaccctgctttccgtgtgcatgtcttgtcacttatgattaaactaaacacaagtttttccatttttaatgctgctatgcttctatacctctggtaagtttgatcatcgtgttctgggttgggagggtgagagttcttgtgattccctttgtacttccctgacactaacacatgccctgcacacccatcatgttgcatcagtgtccatggtggtggtataaaattctcgagcttatctcctcttttaaatactgagtaaatacataagctttttctaagcttatgtatttactattaccactatgatctcagctttatttaagagcaatttaaaatgcagttcccataggtgtctttttttacctctcctaagaatatacaggcttgcctggattaagaccctatgatctctatgtagactgacttaaaatccaatggaatgaacaaaaatatttaggatgcttattggtagttgccccttttacacacttgctcccccaacttcaagcatttagcgatgagaccagaccaatgtgagtgtgtaaaggaatatagtagatttcactttgcaagtcctaggtagtgtcagacactaagactcagtagtccgtccgttgtaggaatctgtgtctttttttggaggactctttttctgtagtagtagttgttgttgttcatctgtcaagaaaaaagttttcctttttgtggctctcaaattggggtatagggtaggagacaaaatgaggctgtatttcactgttagtgagtaactaaggcttctccctccctccctgtcctgtcagtcttcagccaatgacttgcttgcatcagacatctttgctcctcccgtctcagaaccttcaggccaggcgtcacccacaggacaacctacagccctgcagcccaaccctctggatctcttcaaaacaagtgctcctgccccagtggggcccctggtgggtctaggtaggtgcctagagataaaattaagtatgactcttttgcttttgctcataaaatgatgatgcatcggaagagatttcatactcccagagggttttacagcataagatttgagcatcccagggagcccttctcccacttctactatacaaccccacatccatttgatattcttgacttgtaactcacatttggctcctcgaggcagcatgagacaagaaattcattttcagtattgtacttacttgaaccaactggtcatggtttcctgaaagacaattgtaagggattctaaactcagaccagcttcagtagcaaaacagggttgacataagagaggcttgtctgtcaacatgcatgtcttccatgtcttttgccataatagatcgaaggcctatgtcctttcaacacatagccctcttagaaggaatatatgcccaagaaggatgtaagttaagtctgaagcaagaataagtcatagagtgaaagtcctaggttctgggcccagctgtgttcctaggtgtatggtaagggtagatcaggcacacatcctgatcagtctctgagcacttctgccataggagctccttgccaatattttggctagcttgagtgttttactgaagctagaacataagtcctagaaagccaaagttgaaaaaagagagaaataagggaagagatggaattttatcagacagctagtatgcattgacgctcttaattcctaaatgtgtcattagcttgtgtgagccgctgatcactctgtggtaggacagtgggaaagtccacttgactgagggctggccttgctattcttagtccatagcctatagttcttttcagactccatggtacagttttcagaaaccctgacaatagtttttgctgtcctgctatggactctatttttcttctcttggcacctctacaaactccaaatggactctggcttgggaggtggaggactgtagacgaggaaggactctcctctccttcggtaaaatctgaccagggatcctggctttctctgcctcctgcagtcagtcatcaggatccttgttttgttttcctctctgtctctgttgttttcctacaaaggaaaatagtttggttcttttacaagaaatctgtttaatcatatctagaatagggtggccagaggaggactgttactcaactgctgagtggcagaaatccgtgagggtatgaaaagccagcttgtcccaggtctctgctcgcatttaccccatcaagaggctctctctaaagacttcatgtctcttgggggcttccccctttctgcgttgctcttttccttgcacccccaagtggagctggttggtacccttccctcacagaagaccagagtgcttgcaatgcaatgtctgcagcgagatcacatcacagagctttttatctgatatcaatgcccttaagaatttttgcagccaatatttaacaagtcagcctgaaaatacagctggaccctataactgtttatttattcagacgaagtgaagctttttggctaggtgcccctgttgagggcttggggtatacaactgcagaatactgatgattgttccaagtttggacatgggactcaaactgagctctacagtatagtccctgtccactagcagggatcctcagccaaaccatggaaggttgtaggtctggcttccgctagacccagctgggggactgtctcccctggagaactgggggggtggggagagggtattgtagaaagctgagccctcagattcaacttgcttgtattttaatctagcctcagaaggtaataaaattaatgttctatacccatgtcccctttttccttattccttgcccctactttgtcaatgtgttcaatgtgttcaatgtgttaaaacacaatgtggggatttggtgggtaggaatgaagactggtataagtatatactgggaaagccttgaattcctggcaaatgtaatatttttctctcctttttttttttttttttttttgagacagagtctcactctgtcacccaggctggagtgcagtggtgctgtctcagctcactgcaacctctgcctcccaagtttaagtgcctcagcctctctagtagctgggattacaggcatgcgccaccacacccagctaatttttgtatgttagtagagacagggtttcgccacgttggccaggttggttctgaactcctggcctcaagtggtcctcccactttggcttcccaaagtgctgggattacaggtgtaagccactgcgcccagccctaatatttttctcttttacaaataccattctcactaatatgatattttcctaaatgaagacaagttgtccaacatgaaagatgataaaattctaccctcctttttgcacagctaactggtggaaattattagcaagtgatctggcttctgttaatacaatttaattgaatgtgttttaaaatacaagcaacaactttgttcaaactaaacccatttttagagcctgtattgtagaatataacttttctcttgatttgttatgaaaggagtatattcttcagtgaaaatgaagtctaatttctgtatccgtgaaataagtatttgaattaacatagcatttgaaaattaaaattgccccatgccttgctgccaaggaagcagaacaggagaatggggtgccggatttagagccagtgtgcctgattttcagtttctaccatcccagactatgaccttcccaattttaatgaatattcttgcacccagtttcctcacctccaaaaagcatgctgattaagtgaaatggcctgttctgaaacccaccactctctgtgagtacaccatgtgtgcccatggccagatggccagcatgcatgatgagaatggagtcaggtaataccaatgtctcagactaagaagctcgaagatataatcttgtgctccatcactcctaaataccattttcaaagtattccctcttggaaacataaacgtccctaacccaggtctgaagaaaactttcataactaaagaatgccatgcaccaaagctcaaagcaagtagatttcaagagcgaagcatcacccactaatagatatgaggctgaatttaggtttccttcttagcggtgagtttaactgaatcattaatgcacttggaaagaggcaggaaagacagtgccctgtatattagaacaagatgcagggagcgagcctctcaagaatcagaggccatcattggagaggcctggattctggcgatttaacgaattcctgatgacatagcaaggtcgtaggagatggagccattcaccacaaagatcagatgccccaacacaggccattagttaccttgaaagatttttgtttcccattgtcctctctcctcttttaaattctctgttctaacttctggcaaggtttagcaaatggcacatggcaggaagcacttttatttgaaacagtcttcctaggataacatcctttcttccatttttatatataaacgtctaaaactatcttggcattggccaaactttatcttccctttatgtatatagctgtatcagtcttggcagcaataaaaagtgaagaaactttgaaatggtttcttcaggatgcaagcatgttgaggtcttgtgcacatgtgtgattgctggtttccataagactccagacgtgagccagttgccaaatgaaaagatcaaatctgtgactcagagagtccaatggattatcttaattaactacatcataatcagcatggttcatgcataaaaatatattcacttaaataagttcctgctattaacaggctctgttctagttgtttgagatgtatcagacaactagtgtctgtatgataagggcttatttttttgatgagtagatacttatggaccgtactacccttctaatcaggaaagttaaaaagacatggtaggaagaacatgggcctcaaaatgcaaccagcatttgaatgctcactatacagtgttagctggctaacttttacagtgattaatctgtcatattcttcccatatcagcctcagggctcaatggaggtgttagctgtggagaggctttccagagagttgtgctctctgaaattcaagaatcttcttcaagcttgactcctgataagtatttttcttcctcttacttcaggtggtgtaactgtcacactccctcaggcaggaccatggaacacagcatctttggtcttcaatcagtccccttcaatggctccgggagccatgatgggtggtcaaccttcaggttttagtcagcccgtcatttttggtacaagtccagctgtttcaggttggaaccagccttcaccctttgcagcctcaactccccctccagtgcctgttgtctggggcccttctgcatctgtggcacccaatgcttggtcaacaacaagccctttggggaatccttttcagagcaatatttttccagctcctgctgtgtccactcagcccccatccatgcactcctctctcctggtcactcctcctcagccacctcccagagctggccctcccaaggacatctccagtgatgccttcactgccttagacccacttggggataaagagatcaaggatgtgaaagaaatgtttaaggatttccaactgcggcagccacctgctgtgcccgcgcggaagggagagcagacttcttctgggactttgagtgcctttgccagttatttcaacagcaaggttggcattcctcaggagaatgcagaccatgatgactttgatgctaatcaactattgaacaagatcaatggtaagccactcaccactctgcctactgttccaacaactatctccactgccacatggacctaaatgagttccccaaatgaaccctctcccacccgccaacagctttgctcttgcttctgttggtaatcaagggttacggagacaacttaaccatttaccttttggtgataactatttaccttagtcatttctgaggactgacccaatgctgccctctagtgataaatcttaaaagggctgccatgagctattgaaatgtgatgactggtgactcttggagggctgtgtaataaggcgtcatccatgtcccatcagcttaaaatgaggggattctgaatctcttccacttcagataaatatgcatggctttctcttccgagaaggataataattattggggtacctagtatttggtgttgatttttgttccactgatgtaaatttcaaaagtatagaactaaacttcaaaaataagctgactcggggactggcctatatttggggaaagcttgtctactgattgcctggattttttaccttctagaaccaccaaagccagctcccagacaagtttccctgccagttaccaaatctactgacaatgcatttgagaaccctttctttaaagattcttttggttcatcacaagcctctgtaagtatgaactactagaagctcttctccaaagtacatgccacatagagctccagcctcctgaattaaccttgcttttataatagcttttatttatttatttatttttttaagacagagtcttgctctgtcggccaggctggagtgcagtggtgcaatctcagctcactgcaacctccacttcctgagttcaaaggattctcctgcctcagcctcctgagtaggtgggactataggcacgtgccaccacacctggctaatttttgtatttttttgtagagatggggtctcgccatgttggccagactggtctcaaactcctgaccttaagtgatccatctgccttggcctccctcagtgctgggattacagtcatgagccaccgcacctggctataatagctttttgatggtaaaacatgtttagctaagatttgtcaccaagaaccttcacagtataaacattcatttaaactggagaaagattatttgcacaagaactattatcttctgaatttgagaaataatatcacatagaaaacatccttcatatctcacttaacctgacccatgaaagcatttcgggagaaaattgagccaaaatactgtcttgaaaacctttcaaaaatttaagttcttaattttccaacaatatttctatagcctgtgaaaataatacttcccatttcggggaggcaaatgaaatgcatctgaaccttgattttcacataaataatatacactgccatctgcaagcagatgaaaacaaaacactgtaagccccatataatgtttgattggctgattggcctatgacctaagcgatttttaaaagaattttggaagtcttcattgcgatttttttcttatgactgtaactgtatttattgactagatgattttatcttcttaggtggcttcttctcaacctgtatcttctgagatgtatagggatccatttggaaatccttttgcctaaattctgtaagtagaagatcctaataagcctgtctcaggggtttttgtgagaaagggtgacatggaataaagagtgaaattttaattttagaattgggaagagggtaaatatctataatttaggagtaatcgacaggaaaatctctactgagatcattcaataatgactaggctgggcacttaagaatagaattcctaaacacatcaaaaaatagtaatatacccttggggatgtggatttttatcttattccatgttcttggtttttcagttctgtgtgggaagtaaaactcaaaacaacacatcacaggtttctaacctttttactttcatattgaagtggttgcaaaacaacctagtaataatttggtttcctataaagggttcagattccattgactttctgaagccaccaagtcagcaaaacagattatgatcattacttctctaccatttaactgtgagcaatctcaaagttagtctgaaagagtctgatggtattaaatctgaaagttttaacaactattaaagatctccttcataggcagtaggagctcaaaatgagtctgaaggttgattcttctgtctcatgaactttatcttagataagtgattaggtagaatcaccctcagctgaaatcctgggagggctcagtgtaactctttctctacagaaggtgacagcaactttattctgatctcaaaagactgaatttagtagggaaaggaacgctctccccattttagagcaggtaggccagctggtaggggtagaacaatagaaataatgaaaaacaacaacaacaacaacaaaaaccaagcccattttttttccaatcttgtctcatccaaacaggactactaaactgtgatttggctcatctagaatgtaattatttttaatagatagatatcttaaacgtggcgaaaacaataagattgagcttataggcatctggatcattttccctcaactccagttctacaatgactgtgtttcctgtagtacctttccataaactgcttcagagaactgggtaaatcattaaaaatgcaaattcctgggtcctactgcagccctaaggaatttctctttggtgccaaggaaatgcttccttttaacaagagtgcaggtgattctaaaggtaataaagcagtaagtagatatttaagagctagaagtcttaccagagatcattctcaccttccattcaaggggagatatacccaaaccaatagaaggagtaaactacactcagagtcaagatggattgtatggactaaattgaatgaactagacttctctttggaggtccttccttctttaggtcatgaaggaaggatagtttaggtcaacctgctacatcaatagattgggtaaggggaactctcatgggataaaataactaacattgttgagcacttgcgctaagcattttattagatgctctacatttatcatcttcatcaatcctcacatcagccctaggagatactattactgacatctttaataatgacttgatatttaatacattgatattcagttcaaaaattctaaccacaagtttctttcttctccatacctctctaggaacttggtctgcagaccatccagaggaataaaaaggttggccttagtagtcaaaaacaaagctgatagccagacacgttctgatttctgcccttgttccagctttgacgtattatctgttgccttatttctcattgcctcttctacttgtaaaatgcttttcactttctgtctaggttaaagctaaactgaatctatggctttaaataaattaagatcctaaactctctagcttaagtgtaaatgaagtacagtagtttccctactgaaccctgcctcttgtgtccctggaaccttctagaacacctgccttctaccctctggttgggagatgcagccaccacatcccttcatatcatactgttttgaataaattttcaaatccttattgttcagagttgtttgggggttctgtttcagagcataaaacctaaaggttatagtagaacaaggcaccttcttaaaagaaatcttgcttcagaccatcagttacagagaatttctaaagtaaaattgaagcaactacaacttctccttagacactttggaatctaaccacttaaggacctttttaaagagatagcttctcttctttctgaagatcaatttctcccaaggccaagattgtccttttctcccatttcttgctagctattgcaaatgagggaagaacattattcatctctcctccccttttttttctgattcttttttcagtcagttttgctcctgggttcaagtagtattaccaccctttcacaagcaacagactctcacagggcaaaaaaaaaaaaaaatctaatgattcacagacagatctggagcctctcttcattctcagtaattgctagtcccaagaactagaattgcaaatgggcacaacctatatccttcctgtggaagaggaggccactctcttgagctgaagttccagaagagcagttaatgttcaagagaaattgaactcaactcagcaacaaaggactctattttgaagagcaacatatcacaaagctaaatgtgattgtgccaaacacattaggtgcttatttggggtcatgctaggcctttatcaagtaactggaaaacttttcttgcagccacaatctcaatgtcgttagtaggaagataagaggggagaaaaagctgtagaacaaatgtttggggttaccattgaaaatctaatgtctgcaatatttttctcctcacaacttggaaacgttcccagttcattttcagtcctgttgtgagcacagttctgaagggtttattattgtcaaaataagttttgttttgttttgtttatgttgggtttttaatgttgtctcttgacccttaatgctcaggttcttgtgggagttaatcagccacatccaatgttaccttgagggggaagaagagggtgatgctcagaagctaaacaagacaggggccacatgaccctctattgattagccccaagtagaaagtcctgtggttttatgtttaatggtaatagttgatcatatatggcataattttctatcagcttcctactcagtcactataaacacagacttgaaatagtactttaaatgtccaaatacctaaatgtgctaaactggaggtaactatttctaggtagttgaatttttgaaagtcatgatcagccacacaactgttttgtacatacttattttctcatgcacttttctgtatgcaaataaagctataaatttactcatttcaataaactggagtggcagaatatca

SEQ ID NO: 14 - RNA, 4617 nt, Homo sapiens
guccuuauuugcacccgccccccgcccgcgucggucuggggcuuuugacuucuccccgaacacauuuccccucccgucgcugggucccugcgaucgcccccagcugguggggcucgcggagcucaggggagcgggguccucugcgccgcugcagcgcgaguuaauaaacaguuaaguuuggaagacucugcagacacguugagggggaguuaccaagcccaggcagcaaaaacauccuggcacauuccuggggaguccucagcugccagcaucugauuagaaccauaucucucgccgggaguggccgcgcggcuccgaagcucccggccggcggcuauuuaagcgaggcccgccgcauccgcugcgcuguagccuggaggcuccgggcgcggggaagucaugcucgcuucacggaggcaauagcuagccggugucugugggagguuauguuuauuugagacuucuccaucgggaucgccuggugucaccaaguguccacugguacugagguuugcugccugccuucuugccaugucuaacgaaguagaaacaagugcaaccaauggucagcccgaccaacaggccgcaccaaaagcacccucaaagaaggaaaaaaagaaaggcccugaaaagacagaugaauaucucuuagcaagguucaaaggcgaugguguaaaauauaaggccaagcugauuggcauugaugaugugccagaugcaagaggggauaaaaugagccaagacucuaugaugaaacuaaagggaauggcggcagcuggucggucucagggacaacacaaacaaaggaucugggucaacauuucccuuucugggauaaaaauaauugaugagaaaacugggguaauagagcaugaacauccaguaaauaagauuucuuucauugcccgugaugugacagacaaccgggcauuugguuacguguguggaggagaaggccagcaucaguuuuuugccauaaaaaccgggcaacaggcugaaccauuaguuguugaucuuaaagaccuuuuucaaguuaucuauaauguaaagaaaaaggaagaagaaaagaaaaagauagaggaagccagcaaagcaguugagaaugggagugaggcccuaaugauucuagaugaccaaacuaacaaacugaaaucggguguugaccagauggauuuguuuggggacaugucuacaccuccugaccuaaauaguccaacagaaagcaaagauauccuguuaguggaucuaaacucugaaaucgacaccaaucagaauucuuuaagagaaaauccauucuuaacaaacggcaucaccuccuguucucuuccucgaccaacgccucaggcauccuucuugccugaaaaugccuuuucugccaaucucaacuucuuucccaccccuaauccugauccuuuccgugacgauccuuucacacagccagaccaaucgacaccuucuucguuugauucucucaaaucuccagaucagaagaaagagaauucgaguagcucgucuacuccgcugaguaaugggccccugaauggugauguugacuacuuuggucagcaauuugaccagaucucuaaccggacuggcaaacaggaagcucaggcaggcccauggcccuuuucaaguucgcaaacccagccagcagugagaacucaaaaugggguaucugaaagagaacagaacggcuucucugucaaauccuccccgaacccuuuugugggaagcccucccaaaggacuguccauacagaauggcguaaagcaggacuuggaaagcucuguccaguccucaccacaugacuccauagccauuaucccaccuccacaaaguaccaaaccaggaagaggcagaaggacugcuaagucuucagccaaugacuugcuugcaucagacaucuuugcuccucccgucucagaaccuucaggccaggcgucacccacaggacaaccuacagcccugcagcccaacccucuggaucucuucaaaacaagugcuccugccccaguggggccccuggugggucuaggugguguaacugucacacucccucaggcaggaccauggaacacagcaucuuuggucuucaaucaguccccuucaauggcuccgggagccaugauggguggucaaccuucagguuuuagucagcccgucauuuuugguacaaguccagcuguuucagguuggaaccagccuucacccuuugcagccucaacucccccuccagugccuguugucuggggcccuucugcaucuguggcacccaaugcuuggucaacaacaagcccuuuggggaauccuuuucagagcaauauuuuuccagcuccugcuguguccacucagcccccauccaugcacuccucucuccuggucacuccuccucagccaccucccagagcuggcccucccaaggacaucuccagugaugccuucacugccuuagacccacuuggggauaaagagaucaaggaugugaaagaaauguuuaaggauuuccaacugcggcagccaccugcugugcccgcgcggaagggagagcagacuucuucugggacuuugagugccuuugccaguuauuucaacagcaagguuggcauuccucaggagaaugcagaccaugaugacuuugaugcuaaucaacuauugaacaagaucaaugaaccaccaaagccagcucccagacaaguuucccugccaguuaccaaaucuacugacaaugcauuugagaacccuuucuuuaaagauucuuuugguucaucacaagccucuguggcuucuucucaaccuguaucuucugagauguauagggauccauuuggaaauccuuuugccuaaauucugaacuuggucugcagaccauccagaggaauaaaaagguuggccuuaguagucaaaaacaaagcugauagccagacacguucugauuucugcccuuguuccagcuuugacguauuaucuguugccuuauuucucauugccucuucuacuuguaaaaugcuuuucacuuucugucuagguuaaagcuaaacugaaucuauggcuuuaaauaaauuaagauccuaaacucucuagcuuaaguguaaaugaaguacaguaguuucccuacugaacccugccucuugugucccuggaaccuucuagaacaccugccuucuacccucugguugggagaugcagccaccacaucccuucauaucauacuguuuugaauaaauuuucaaauccuuauuguucagaguuguuuggggguucuguuucagagcauaaaaccuaaagguuauaguagaacaaggcaccuucuuaaaagaaaucuugcuucagaccaucaguuacagagaauuucuaaaguaaaauugaagcaacuacaacuucuccuuagacacuuuggaaucuaaccacuuaaggaccuuuuuaaagagauagcuucucuucuuucugaagaucaauuucucccaaggccaagauuguccuuuucucccauuucuugcuagcuauugcaaaugagggaagaacauuauucaucucuccuccccuuuuuuuucugauucuuuuuucagucaguuuugcuccuggguucaaguaguauuaccacccuuucacaagcaacagacucucacagggcaaaaaaaaaaaaaaaucuaaugauucacagacagaucuggagccucucuucauucucaguaauugcuagucccaagaacuagaauugcaaaugggcacaaccuauauccuuccuguggaagaggaggccacucucuugagcugaaguuccagaagagcaguuaauguucaagagaaauugaacucaacucagcaacaaaggacucuauuuugaagagcaacauaucacaaagcuaaaugugauugugccaaacacauuaggugcuuauuuggggucaugcuaggccuuuaucaaguaacuggaaaacuuuucuugcagccacaaucucaaugucguuaguaggaagauaagaggggagaaaaagcuguagaacaaauguuugggguuaccauugaaaaucuaaugucugcaauauuuuucuccucacaacuuggaaacguucccaguucauuuucaguccuguugugagcacaguucugaaggguuuauuauugucaaaauaaguuuuguuuuguuuuguuuauguuggguuuuuaauguugucucuugacccuuaaugcucagguucuugugggaguuaaucagccacauccaauguuaccuugagggggaagaagagggugaugcucagaagcuaaacaagacaggggccacaugacccucuauugauuagccccaaguagaaaguccugugguuuuauguuuaaugguaauaguugaucauauauggcauaauuuucuaucagcuuccuacucagucacuauaaacacagacuugaaauaguacuuuaaauguccaaauaccuaaaugugcuaaacuggagguaacuauuucuagguaguugaauuuuugaaagucaugaucagccacacaacuguuuuguacauacuuauuuucucaugcacuuuucuguaugcaaauaaagcuauaaauuuacucauuucaauaaacuggaguggcagaauaucaaaaaaaaaaaaaaaaa

SEQ ID NO: 15 - protein, 770 aa, Homo sapiens
MSNEVETSATNGQPDQQAAPKAPSKKEKKKGPEKTDEYLLARFKGDGVKYKAKLIGIDDVPDARGDKMSQDSMMKLKGMAAAGRSQGQHKQRIWVNISLSGIKIIDEKTGVIEHEHPVNKISFIARDVTDNRAFGYVCGGEGQHQFFAIKTGQQAEPLVVDLKDLFQVIYNVKKKEEEKKKIEEASKAVENGSEALMILDDQTNKLKSGVDQMDLFGDMSTPPDLNSPTESKDILLVDLNSEIDTNQNSLRENPFLTNGITSCSLPRPTPQASFLPENAFSANLNFFPTPNPDPFRDDPFTQPDQSTPSSFDSLKSPDQKKENSSSSSTPLSNGPLNGDVDYFGQQFDQISNRTGKQEAQAGPWPFSSSQTQPAVRTQNGVSEREQNGFSVKSSPNPFVGSPPKGLSIQNGVKQDLESSVQSSPHDSIAIIPPPQSTKPGRGRRTAKSSANDLLASDIFAPPVSEPSGQASPTGQPTALQPNPLDLFKTSAPAPVGPLVGLGGVTVTLPQAGPWNTASLVFNQSPSMAPGAMMGGQPSGFSQPVIFGTSPAVSGWNQPSPFAASTPPPVPVVWGPSASVAPNAWSTTSPLGNPFQSNIFPAPAVSTQPPSMHSSLLVTPPQPPPRAGPPKDISSDAFTALDPLGDKEIKDVKEMFKDFQLRQPPAVPARKGEQTSSGTLSAFASYFNSKVGIPQENADHDDFDANQLLNKINEPPKPAPRQVSLPVTKSTDNAFENPFFKDSFGSSQASVASSQPVSSEMYRDPFGNPFA

SEQ ID NO: 16 - DNA, 57697 bp, Homo sapiens
agatgcaggggcgcaaacgccaaaggagaccaggctgtaggaagagaagggcagagcgccggacagctcggcccgctccccgtcctttggggccgcggctggggaactacaaggcccagcaggcagctgcagggggcggaggcggaggagggaccagcgcgggtgggagtgagagagcgagccctcgcgccccgccggcgcatagcgctcggagcgctcttgcggccacaggcgcggcgtcctcggcggcgggcggcagctagcgggagccgggacgccggtgcagccgcagcgcgcggaggaacccgggtgtgccgggagctgggcggccacgtccggacgggaccgagacccctcgtagcgcattgcggcgacctcgccttccccggccgcgagcgcgccgctgcttgaaaagccgcggaacccaaggacttttctccggtccgagctcggggcgccccgcagggcgcacggtacccgtgctgcagtcgggcacgccgcggcgccggggcctccgcagggcgatggagcccggtctgcaaggaaagtgaggcgccgccgctgcgttctggaggaggggggcacaaggtctggagaccccgggtggcggacgggagccctccccccgccccgcctccggggcaccagctccggctccattgttcccgcccgggctggaggcgccgagcaccgagcgccgccgggagtcgagcgccggccgcggagctcttgcgaccccgccaggacccgaacagagcccgggggcggcgggccggagccggggacgcgggcacacgcccgctcgcacaagccacggcggactctcccgaggcggaacctccacgccgagcgaggtaagagccgcggcgcccccggatctggggcgggcttggcgtcccgagcggcccccggcgccggagcctcccggctgcgcgctttgcccgccgcagcccagccggggccggcgcctccctccgctcgccgcccgcccctttcacctcctggctccctcccgggcgatccgcgccccttgggtctcccctcccttccctccgtccgcgtctcctgcgccccctccctgcgctcgtcccgccgctcttcccgccgcccaacttttcctccaactcgcgctcgggagctggcgaggcggcggcggctcctcagtgagtcccgggagggacaggcccggggcgaaggcggcgaggcccgcggtttcctggactggggaggagggcgggagtgggcggcgaggtgggatgcgttgtgtgtgttatgtgtgtgtgttgcattccactccatgtctttttggtccccttttggggattcacccccaattcagcaggtagctttgggctcaacgctaaaaatccggggcattcctaagtccttttccacccccgggaaagcctggggtgcgggttggggtcggatggggtgggagatgaactgcggaggacgtggagggctaggttagcttctcttggaataggttttaaggaggtgtcgtcaccaaatggctgaatctgcttgagctgagagcgaaaaacgactcccctttccagaaggggtgatcttatgacttggacggtctctgaaagggtcggaagtttggggaacgggaggacaacccacggtcgttaagccgaggtgtgggatgggggcggaaggaccgttcggtcccaatctggttcctagaggtgggggaagggatgagggtttttgtccggtgtggttcactcggcagcgatgcgtatgcttctctggcccagacccctctgcacctcgcttcccctaccgttatgtttggggttgggagaaaagtgaggctacgacccatgtttgcggaggaattttatggaccttgtagatgggggttcatatagaacacacaccccctatgaggcagccagacacttttttggtggtggtggggggggggtggggtgtgaagcctgtttcttgttctgagcccagaagctatcaacccttttgaaaaacattaccacggtgcctttctcccccagcactcccccacccccaatttccagatgtagcagccgcatctggttccgtttcaccccacacgggtacaccgcagccgcattattaacttccctcttcctcccctccccctcccccaaattaaaactcagattcttcagcctgtcttgaccacctccctccttaacatttctggagacttggagatgcggcgttgagattcgggggagaaaagaaagttcccttggatcccgagttatttaagatctcaccaagttattcgccgccgctggtgggtggcggcggtccgggtgctttctggattgcgcagtaaagaggcatcttgggagatggggccaaggttttagggggtgccactcgcgaacggttcatccgctagactaggggggctctttggctgtgcgtctggccagaactggccttgacgatggaagtttctggaaccaaagcgttgctttctctcccttgtgttatagctggagctgcgggagcgcctgccctgcccggagcccgcggtcccctctcggctgccccgcggtggcgtcacgcgcccctcccggagcaagcccggtgcgcagggccgggggcgtgggcggctgctgccagaggcgctctctgtgtgtttttaaggactgatttgggccgcatcccccggaaactaaagtggggtgttttaccgtttaaataacggctacaggtttgaaagcggggttggattttcgagttgtgtttggtaatagtctttgaggcaggaaagcgccttgtggtccaaagttgccgggagggtggggagagtcggtgtcttacccgcttctttccagcctctttcaaattgaaaacacttctctggtttccttctttgggcggtagttttggaggctgtaatgaaatcgcactttctctagacgtggtaattaaggtgactgtttcctccgcagatgtgccctaccctttgcacctccggaccagcgctttttttggaatactatctagccttgagactgtttagcagaaagtggccattttcctcccttggcccgggctcccggtttcctccctgaggcttgtttaaaagcgaagtagcagggccccgtgggacgcgccttggtctgggtaatcacccccacgcccgggtcatccaccttcctctcggtgaccgaggttcagcagcctctgctattgccggccgtctttgccgatggcctgcctccctaatgacttgtttacatatcctacccccagtgggttaggagaagctccggggctgccccgaccctccgagtgcagggtgtttggggaccgggaggctgctggggcctgactccagctgggagggttatgaactgcatcagtgacgagctgcttgaaatatctgttgcatttactcttagtcatagctgagtgtcagctttttaatgaggttcatccagattgagagccacttggactgcgtacttcactgcctgcttttccaaacatgcctgcagaaatgctcattttcgaggtatttttcccaatgggaattcaggccagagtgggcaccacttgaacaatcttagggtgcttcttttccttggcctctggccatggagggtgttagacagttccattaggtggccctttgatagcaagggaagcaaaggctcaggaagaaatggagaagcgtcccccactccctaggggcagaggattagatacatcggtgcatccctcaggctgggctagctttattcctggtggactccagagggcaagaaaattgaattgaacactgggtaggcagattcaagccttagagaccaaggaaaatccatgggttttgcttttagtggtgtgctctttgttttcagtattgacctgaaacaagactcctaaaatgagagatttgctggtatgaacttgggggtttagcagccggcttctacaaaggcttttttcttgccttcgtttctaaagtgtctttcgtcaaaatggctgttagttatagaacatcctagcaaagtttgagcctgttgctgctggaggaaaaggagttagaattgattcaaatgtcttattctgaaagggcctcacatcacttgatagtttaatttcctcctgggaaatttgtgtcttacatttgtcttccccagagctttgtaaaaggcctgaacgcaccagggactagtgggagcccagatgcagagctttagagaagattctggtgtttccagagaggatgaaatgtcagacttgggctaggatatttgtttttcctcctaaggttgcatctactttaaacagaaattctctcctcgccaccatttatctctcccctgcaatgaaagaaaccatgtttagggccctctcccccatttaatagccctcacatggatgaactatcccaagaatttggtggggttccactcatagtacatcctgtcttcaagagcaaggttttctagattatgtgcagcagttcgtgtttcacttgttgctttttttttttttttttttttttgagatagtctcgctctgtcgcccaggctggagtgctgtggcgctatctcaggtcactgcaacctccgccttccggttgaagcgattctcctgccccagcctccctagtagctgggattgcaagcatgcgccaccatgtccggctaattttttgtgtttttaatagagatggtgtttcaccatgttggccaggctgggcttgaactcctgacctcaagcaatccgctggcctcggcctcccaaaatgctgggattacaggtgtgagccattgtgcctgaccacttattgctaattttttatatgtctcttacttccaaggacatttagacactttttttttttaaagagactcaaaaaattagcatttccattggaccaactaaaatttagcaagctgagctgagtaactttctccatatgtttattaagtacttgccccctgccctctcaacatgtgagtagagaatggtcactttggggaagaaataagtcttattctcatctgaagggattaatgttttggtgttacttcctcaattctgaagaaccaagttgtccagaaattttctcagggttctttggactagagtttggctggttaacaaggggtactacctaattgcttttctctgatattctcagcctctttttctggaggagtatctctgtcagtttcttttcatcagcccttttttttccttcattcacttactcattcatccagttaacaaacatgttggcatctcctgtgtacatgctaggtgccgagggtgttagcaaaggttagggaggcacagaccctgttctgaaggagcctgcagtttcgtggggagagaagagaatgaagaacataaataacaatcatataatatgacctaagtgctatgtgagaggggctagtaatgtggtttgcaaatttggaggaatgaaattctccagctagaaggcccaagaaagtcttatggaagaaacagcttcttaaggtggggttcagagaaaagggaagggctggcctgttgcagaacaaggaatggcatgaagaaagtcttgcacagaggcatggatgttgcttcgagctgtggcgccctatagaaatagaacatgagcagctggtcacagtggctcatgcctgtaatcccagcactttgggaggccaaggcaggcggattgcttgagcccatgagatggagatgagcctggacaacatggtgagaccctgtgtctaccaaaaaatacacaaattagatgagtatgctcgtgcttactggtagtcccggctattcaggaggctgaggtgggaggatcacttgagcctaggaggcagaggctgcaataagctgtgattgcaccactgcattccagcctgggggacagaggaagaccctgtttaaaaaaaaaaaaaaaaaaaaagccaggcacagtggctcatgcctgtaatcccagccctttgggaggccaaggcaggtggatcacctgaggtcaggagttcaagaccagcctggccaacatggtgaaaccctatttctactaaaaataaaaaaattagccgggcttggtggctcatgtctgtaatcccagctacttgggaggcaggagaatcgtttgaacccgggaggcggtggttgagccaagattgcgccactgcaactccagcctgagtgacagagcaagactccatctcaaagaaaaaaagaaaggaagaaagaaatataacattataacatgagttatgtatatgttcagattttctagaagccacattggaaattaagttaaaagaaagaaataggtaaaaaaaatttttttttttgagacggagtctcactttgttgccaggctggagtgcagtggcgcaatctcggctcactgcaacctctgcctcccgggttcaagcaattctcctgcctcagcctcctgagtagctgggactacaggcgcgcgccactgcacgcagctaatttttgtacttttagtagagacggggtttcaccatgttggccaggatggtgtcgacctcttgacctcgtgatttgcccacctcagcctcccaaagtgctgggattacaggcgtgagccaccgcgcctggccaatatttgttttttaattaacttgtttgtttagattttatttaatgtaactatatttccaaaatattatcatttgaacatgtaatcaatatagaaattattgatgagatactttacatttttttcataacaagtttttaagatgcggtgtatactttttacttatagcatatccgttagcaccagccacatttcaagtgtgcagtggccactgtgtgggccacaggtctagaatataagacatgaagatggagagtgagaaatgcctttggaaaggttggaagttcctgtccttctgctgccaattaccaaatctcctgagagtgctattaaggagtgactcaaagcactacacaaagagaattataaatatcttaatattatatctgaaatccaaatgcataattctttacatttggttggtactttagagaggagagaatgggcacagtcacccacaccacccatttgagcctcataatcacctgtgatgtggcttcctctaggtgggaaaccgaggcttagaacggttaagtgactatcccagggtggcaagatcataagtggaagggtgtgaattcatactgtctccagcggacaagaataaaaagacccaggctgggtgtggtggctcatgcctgtaatcccagcactttgggaggccactgtaggtggatctcctgagcccaggagttcattaccagcatgggcaacatggtgagaccccatttttattaaatatacagaaaattagcccagcttctcgggaggctgaggtgggaggatcacttgagtctgggggatggaggttgtagtgagttgagatcgtgccactgcactctagcttgggtgacagagcaacactctgtctcagaaagaataaaaagatttggccatgaattcgtcagctagttttccttacataatttttggacaaggagatctgacattcataggtttttctcttagaagtgggagagcttcaaggtcacgtggtccgtccagcccctgctatctcaccagacactgtccaccctgtatgttggatcagtactccagtgagaagacagcaggcactttcacccatgcagcccattcagtcttcataaccacctgtgatggaggcaaggcaagtatttcagccccctctgatgagtgggaaactgagatgtgccccctctctgctccccaccgaggacctctgcatgcaggcatgaatcccaggagcctagctgatattggagagacggggcggggggaaccagctgcagggtcttggaggaagctgctgtgtacacctgcaaggctgcaggttacatctatctgtcaagcagtgaaggaaggaagttgtttctaagggattggaaaaattcattaattagtagaatgagaaactgaggtgaagcaggaggtggcagggtcccagacagcatgttggactagtggcctgtgtcactgtgttttttgcaggcgggtggcatggggtgtatgctgacttcttattccaggagttggtgccaggaggccaggttttcttaacatccttgttttacagatgtcaaacttgagggccagaggggtaggagaggaagagactttttgtaccttttttgggaaagaacaagagggaagctggcagatgaatttgaagtgcattgaccagggagctgagagagggcggtctgcagccagcccacacctgggaggaggcggcaggcttttctggggacagagtggccaagtcgaagcaagcttaaccatctcaacatgacaccactctttcccattggaacctgagaacttgttcagtattctgacacttagcaagggacctgggttttcttggtcaggtgtgcgtttctgggtgacaggcctgcatcaggtgtattttcgggatgtagtaagttgtggaatatgggtttaggggcatcctctggcaagcactgcttctatcccagctctgggaatgtgccccatgcagtgtcctagatggcccatctgtggtctgcttccaagggtctttcttttagttagttagttttgagacagagtctcactccgtcacccaggctggagtgcagtgatgcaatctcggctcactgcaacctccacctcccaaattcaagcaattctcatgcgttagcctcctgagtagctgggattacaggcgtgcaccaccacacccagctaatttttgtatttttagtagacgaggaatttcaccatgttggccagtctggtctcaactccccacctcaggtgatactcccgcctcagcctcccaaagtcccgggattgtaggtatgagccaacatgccctggcacaagggtctatctttgaccaatggaactgcaaatcaagcctcttttgttaccagagttaccttggatttacccttatctacttggtttggataaattgagtttgcatcagatggagtcaggcttgatcaatcccttatttacttcctcccaccctgttctctaatatccaaaaaccttgaggcactattacatgctagctacatttccttgagtaaagtacttaacctctttgagcctcagtttctccattgcataaaaggaataataaaacttatcccccataagtttatagtgaggaatgaattaattcctcactatagttctaaattaattctacttagggcatccttggtacatagtgggtgttcagtattcatttcattttctcttttctgattcctttcgtaaaagtagaaaaatgaaagagaaatgttgacttctcttttgatttgaaatcattaaaacattttagtaagccttgggagggagctagtggtgtggcatgtgtatcccgctggccaagcacatgtgaacgaagccaagaatccaggggcttttctgccagccagcactgactcacttgcgaggggccctgcctggctcgggggaggcagggctgaagtaccacattagggcatgttccggggaagtagattctctgaataacttggatggctccctggagcatttaggacagaagccacctggaaaatagagatggtcacccccacgtagccttgacagtgcccagaaagtcttgtcacttggtaaatgttaacagctatgatccgttctttaagaccctggggagttttaagttttaccccaccagacctgagaagggtaaagggctgcagattctgttcttttaactggggccagtgtgagccatctttgactcagtgcttgcaatagaccttgattctgcagtgggacctcccaggcccccttgccccccgcaacttctggactcatatccgtcagacatcacttgtcaccttccagcatcagggagaactggatccctcctggctccacactcttaggctctttgtaagtagctggtgagggttttcttctctctgcaagggaggctggtagaactatggatgtgattcgtacaattttagagacaaaaagaaagtacccaggaggtcatttatttcagctgcttcattgcataggtcggggagttgagcatggagtccagcagctactaactagttatctctgtacctggcttccatttactggtccttagcttgttccgtgattcttcattgccccttatttctcaccagagggactggttggccctagatggagtggtctttttaaaattttttttttaaattttttgagacagagtctcactctgtcacctaggctgtagtgcagtgctgcgatctcggctcactgcaacctccgcctcctgagttcaagcaattctcctgtctcagcctcctgagtagctgggattacaggtgtgtaccactatgcccagctaatttttgtatttttagtagagatgggatttcaccatattggccaggttggtcttgaactcctgacctcaaatgatctgcccaccttagcctcccgaagtgctgggattgcaggtgtgagccaccgcacctggcctgggcagagtgaagtcttatgctggggagccatcagcatgctcaaacctcctgcaattgtagcacactttgtaaaactgtttcccacaaaagggcagaactatttgggactttcatgagaccattcactttgtagcacatactactttgaagtttataccttggaaaacctcatgatggtattcccaggcttgcacgtaatctgcactcaaaacatagctgtagaattgaactaaagcatccctctgtccaattaagacctataacctctctttttgagacagaatctcgctctgtcacccaggttggagtgcagtggtgcaatctcagctcactgcatccttcgcctcctggattcaagcgattctcttgccttagcctccgaagtaactgggactacaggtgcgcgccaccacgcctgggtaatttttgtatttttagtagagacggggtttcgccatggccaggctggtctcaaactcctggcctcaagtgatcctcccgcctcagcctcccaaagtgctgggattacagggtgcaccaccacacccagccaggacctatgatctaattcattgttggggtagcttcacaattttcttctggacgccttagtaagtccacactttaagcagccaccacatggcatactttaccttctgtttttcctttcccctcccctacctagaccctcctaacttttggggtttttttcctttcctcagggtcagtttgaaaaggaggatcgagctcactgtggagtatccatggagatgtggagccttgtcaccaacctctaactgcagaactgggatgtggagctggaagtgcctcctcttctgggctgtgctggtcacagccacactctgcaccgctaggccgtccccgaccttgcctgaacaaggtaaggtgctggctgggggcagcctggactcctgggccttgggaacaggatgggctgggagggaggtgatatggttgcaggtgatgtggtcaacagggaaggctccttcccaagtggagcaaagaactcccttcctgtaggagaaactctcaagatacctgggttggttctggtctggttataaacataactgacttcatcagaggttggggtcatgaaggctggtgacatccatttacctgagatgacatgtttgtggggggtaatttatgcttttctctttctgaggaaagaatatctgatgaggaccctagtgtcacactttaacataggtgatgtataaaatgcagctggtggtgcaatggggagagaatgaccttagaatttgcgtgtagaacttgggtcagactacaggggatgttgtaggaggtgagagcttgctaaagacctctgacttccagaaaattgtttcaaggccacatcttcgccaggcatagtgggtcacacatgtaacctcagcactctgggaggctaaggcaagaggatcacttgaggccaggagttcaagatcagcctaggcaatatagcgagaccccatctctacaaaaaaaaaggaaattaactgggtgtgatggtgcacgctgctagtcccagctacttgctactcaggaggctgagacaggaagattgcatgatcctaagagttgaggctgcagtgaattatgattgcactactgcgctccagcctgggtgaaaaaaaggcacatcttctataagggtcagcagtcatggcttcacgcctgcattttcctatccttaactgtgtctcacaggttctgtttgggggcctgccaagcgatttgctttggataggtactgtttgaggggttttgaagtgattgagacccaggaagcataaaggggcatggagacctatggcgtgttggaaattcagagccatcatcggtaacaggaaggacttaccccaccattcttgggatctgtgtgagctgtggaaaggcctcttgggagattataggtacagaataccggtggctttcgcgggactttgaaaactaatgtatgagcatttctgctgccagaggatagtgtggttcgtgactcagtggctggtcacacagagaaggttgacacacagtgggtgaaaggttggaggtgcgcgtgatggggtggctgtgtgcaaaaggctgccactcagctggtcagggactcgtttgaatgatgagtgatgggtgagaatatgtgtcctctggatggagttggggatgaacagggaaagttgtgtgagactttatagaaggtgcagtggctagagcaggcatattcatgttgctgtcagtaacagaaccgaaggcaaggtctgagctggagcacggtggggacccaaagtgggagagactgtgtctgcccacagggagtttatggtcaggagggatgggcaagtacagggataagtaacacaagacagactgtgtttaaaccacccagtgaagttacaaccagaggtggtgggaatgcagaggaagaggggagcagagagcacctgagatgggcttgagttcagaaggggaaaaatgaagggccctccaggttgaacagcatgagtgttcagagacagcatgtatatggtttatggagaacggtttgcctggtgagtaggtagctctgggaaacaacacttggaaaaattggattgagttagcatatggaaggcttaatgccctgctaagaaaactatacttagggccgggcacggtggctcacgcctgtaatcccagcactttgggaggctgaggcgggtggatcacaaggtcaggagttcgagaccatcctgcctaacacggtgaaaccccatctctattaaaaatacaaaaaaattagccgggcgtagtggcaggcgcctgtagtcccagctactccagctccagtctccagctgaggcaggagaatggcgtgaacccgggaggcagagcatgcagtgagctgagatcgcgccactgcactccagcctgggcaacagagtgagactccgtctcaaaaaagaaaaagaaaactatacttaggccaggcgtggattatgctggtaatctcaacattttgggaagccgaggcaggaggattgcttgagccaagaagtttgagaccagcctgggcaacatgatgagaccctgtgtctacaaaaaatagaaaaattagccaggtgtggtggcacatgcttgtagtcccaactattagggaggctgaggtgggaggatcacttgaacctgggaggtagaggttgcagtgagccatgatcacaccgcttcacttcagcctgggtgacagagtgaaactctgtctaaaaaaaaaaaaaaaaaaaaagcaagaaaagaaaactagacttaaatgggtagatgctgggaaacttgaaaagtttttagcaagtagtgacactatcagctttcagaaagttaatttggcagctcagtgtggatggctgggaggaaagagtgaggtgcacctgtgtttgcatcctgctctgccacttgatagctgcattatttacttcaacaaactactcaaacaccatacgtcacagtttgctcatctgtaaaacagggataaataataaagggttaagtggggtaatccagatgaagcacttccatgtaaggtgttaatagttgctattgctgccactgctgctgccagaaggatgaggtcgcaggttattttgagtgtctggctagaggaagtgcaggtactgaccaggatggggactgggagatgatagaggaaggaaaaagtagtaaagacactacagcaatagcatctgtgggtttaagtaggttgggtgtcaactgtgggcaactggagactgagatgagagtgtaaagggagtgagtcagagtgggaggtttgaggggagtttagatttgaatccgccaattgtagacagcgataaaggagtggaagagtagcaaggagctagttgaggtttgagaatgtgaatttataatggagcctaaagtactttcttttttttgcagcccaagaagggagaagtggatctcgggcctggctgcttgtgagccagcccgacgggatgagtataaggaactttagggccagggtgggggtgctagtagaggagggggcttcacggaagctgctggggcagggtggaggctggaacctgggggctgaagatcttgatgaggacaaagtaccggccctgtgaacagaagaaagggagtaagagaggtggatggggctcttaggagccatgtacccaggaagactgacattaaatgaccattttttaaaaatcaacttaattttcaaaggcacattggctcccacctataatcccagtactgtgggaggcagaggcaggaggatcacttgagcccaggagtttaagatcagctgggtttgtttgtttgttggttggttggttttaagagacagagtttcactctgttgcccaggctggaatgcagtggcatgatcttggcttactgcaacctctgcctcccaggttcaagcgattctcctgcctcagcctcctaagtagctggaattacaggtgctcaccactatgcctggctaatttttatatttttagtagagatgggtttcaccaggttggccttgaactcctgacctcaagtgatctgcccacctcggcttcccaaagtgctgggactataggtgtgagccaccacacctggccaaaccaacttaatttaggtataacagtttgggctattgtaataagactgctgtgaaccttcatgtgcaagcctgggtgggcacacattttccttggactgccctggttttgattttggctccacaccttactgactgttggctcttggggaagttcctctttgtgcccttttataaaatatattgataatgaatgtgtgctcataaggtcattgtgaatatcaaataagcatgtctgcagagctcataggacattgcctggtccgtaggccatgagcagtcaatggccgttgtgggtccctttccctgggcctccaggggagacggcacatggcgaggagcatgttgtttcatgggacacagcaacggaaagcccctgcacttggagaacaagccccaggtctctgtttggtggagtaagcccccgtctcagtgtgagtgtggtgctttcacatagcctgtctctcatgagctttgtgacagaacagagaactgctgtgcccaggacattctaaggggagatctggcttcatgctttgtaagctgtaaggaaccttgtaagtgtaaagtatattgcatagtcttgggcctgctgattattaaataataatgctgatattttttaattaattaattaatttatttgagacggagtctcactctgtcgcgaggctggagtgcagtggcgtgatcttggctcactgcaacctccacctcctgggttcaagcgattcttctgcctcagcctcccaagtagctgggattacaggcgcgtgccaccacgcccagctagtttttttgtatatttagtagagacggggtttcaccatgttggccaggatggtctcggtctcctgacctcatgatctgcccacctcggcctcccaaagtgctgggattacaggtgttagccaccatgcctggccaatgctgctgttgtcctaaaaaaaaaatcatagggcgagcacagtggctcacacctgtaatcccagcactataggaggccgatgcaggaggattgcacgagcccgggagttccagaccagcctgggcaacatagcaagaccccatctctaaaaattttaaaaattagctgggtaacgtggcacacatcggcagtcctagctattcaggaggctgagatgggagaattgcttgagagttgcttgagcccaggagttgaggctacagtgagctataatcaagccactgcactccagcctgggtgtcagaaggagaccctgtctttaaaaaaaagaagaaacacattataatctatgtattaagggctttgtccaaaaggtgagagcaaaccacctaaaaccctgttcacactgagttttccccatttaaaaggccttgctgtgattttaagtgtgtgtgtgtgtgtgtgtgtgtgtgtgtgtgtgtgtgtgtgtgtctgtgtgtctgtgtgtctgtcgggagcccctccccactgagcgcagtaccaacgcccctcagtctgcaagtgctcctgagggattggggagggcctggagtttctggctgtccttggaaagttgatttaataagggttccaggaaaaccagcctccctcccctctccctctccttcccctcctttggtttgggatcttacagagcctcagcttgtttcagatcaggctttgagagtggtgagggagttgtttggaaagactgaagccggtttcagatgataagccccaacattctgagcttgcagagggtgcatttgtctgtcttttgcaataagtcaagtcttggtgggcaaagccagtgagtgagtacaacactgcttgcaaggccactgctggtagttggggtgggggtcctgcccccttttcagcagtactgtgggttaaacaccccagtgctcagaaaacctgcagctcagaagtgatttaatgggctgagttttacagctcctcccacccacccagatttgaaggagtctggtggcttgttagaggggggagaggttgcacttaatggaaaaaccacacatttccattctggcctcaagccccctggatgccctgtgtgcaccacaaagcggggctttgtctctgtgttttgcagaaacctgcacctatgggggagaggctgtgcgtggtgccagagccattgcctagcctcagatcatagggcccttgcaggtcctccatccctgggcgtctccagctgcctttggcccaaaggggtgtgcgtttcagcctggctgcagggagagtctcaaataggtactacaggtttggtagtgggacaccctctgttccactatcagacctgtagtctagcatctacactggactgtggtcctgtgtcccaaggctgccttgggacacaggcaagaccctcccctactcccaccccatctccagcatgatttcttatgatgaaaagaacttgtttgcttctcattcaacctggatggtaagaggagtttcttcatcccctgccagaaggcgaatggaattccatggagcaaaaggtgatgtcagatgaccctcttgagaacaagggtggaggatttaggcctctagaaatctgcaaggtgctaagctcataacaggtttccccagaggatcagctctgtcccacttcccctggagaagtggctccagtgcctggaaggggtgtttgcaagtgttcagagctggacagggaggacccagccctcggcctgtgagagaatgtgaggacgctcacgtggccctcttgaccaagctggggcaagcgcagcaaagccactccgaggctgtgttcttggctccggcttctgcattgctacaccattagcttcactgattttccactctggctctgccaggcccgctccctgaagtcagggaggaggaatttctcagggaagaacaaatggctgtccagagatcttgctgccagtgggggaagggagggatcccaaacaaagactctgtcagggtttccatcacctggttcctgtgactacctggagtcgggtcagcaggaactggagagacagcatcagggattctttgggagcctgtggccccagcacggaggggtgtttgctcctggccaggcagaagcagtgagtgatggcttgtgtctgggcggtgatgaatggccctgggagaagtgagtcctggggagtcattatccgggagggcgaggtctggggtcagagagcccgaccagcagctggccctattttcacaatgcctcgttcctccggggccactgggggctccagctcaccctgtagacaccacctttgcctctttcttccttccctgaggcttggaaatgagacaactgtttccctgttgaccggggaagtccagctgctctcattctcctgggctcctgaacggggcggcccaggccttcctcctgggcctggctctttcaccaacttgcaggcaggcaatcccttctccccacccaccatactccccagccccactgcaccctaaataattaagctgaaagctaactgccctacctggatctgaagggcctgggctaaatcccaaactgtttcctcctaggagaagcctgctggagtctgggccacttctgaccttggggtttgctctgacttacagctggtggcagccaagtagcagggccaattgccctaacccctcctccccggtagtgggcctgttgcctcttagcattgccagtgtggcaccaagagacattgaacttctaccctcagagttccctcccttctcctgtttcttggctcacaacagttcttgcctttccacttgccaaacaggtatctactgccttcatgtaaagcatttgtgccctgcaaactaggggctgtggggtgagggctccgtgtagctggtttcaggcactgagaaagatccaccctggcagagcttgaaactccacgccctctcctcgttcacatgctgtggcgtggctgagcctcccgggatgggttgtgtaaaaggtggggtgggggctgtgccatttgtgttcccaggccctggacatggagacacagggagcctgaagtgggtgagagggtcaaggagttccgcaaagagtagacttagtggttacgaggttgggcagagaaagaggtcagaaacagcaacacggaggtttctaggagttaaccaacagtgaacattgaattcagagcttagcccttcctcacttttctctaggatcaaaaactagcttctggctaatggtccattcattgactgattttttttcactcattcatttattcattcatctagtcaagcaagtctcttcctttttccgtaaatacaatgtatactttatacattgttttatcctagtcccttagctggaaatatctgttcctgtccttttcttccttttcactttttataattcctgctcaaatcttagtttaaggtttagcttgggtttagattaaagcttaacttaagggccacctcccttttgaagccttcccctatctccaaattaattaccccattttttctctttttcttttttctgtgttttttttttctcctgagacctagtctcgctctgttgcccaggctagagtgcagtggagtgatcatggctcactgcagcctcgacctcctgggatcaagcgatcctctggcctcagcctcctaaagtgttaggattacaggcatgagccaccatgcccttttgagatgtagtctcgcttagtcatccaggctggagtgcagtggcgcgatctcggctcactgcaacctctgcctcccaggtgctagcgattcttctgcctcaccctcccgagaagctgggattacaggcacccaccaccatgcccagctaatttttgtattttttgtagagacaggttttcgccatgttggccagtctggtcttgagctcctgacttcaagtgatccacccgcctcagcctcccaaagtgctgggattacaggcgtgagccaccacacctggcctctttttaactttcattctaacacttactttactctgcctcacattatgtggagtttttaatagatgtctgtttactccactagagcaaagttctctatagtcagcaagtatatctttatcactcttttaaaaacattagtgtttaggctgggcgcggtggctcactcctgtaatcccagcactggccagcctggcgaaaccctgtctctactaaaaatacaaaaattggccaggtgtggtggcacgcacctataatcccatctactcaggtggctgaagcaggagaatcacttgaacccgcgaggcggaagttgcagtgagccgagatcgcaccacttcacttcagcctgggcaaaagagcgaaactccgtctcaaaaaaaaaaaaaaaaaaattggtgttttgttagataatctgggttcatctttcaaaattcagaaaatacagacctgtaaagaggaaaaggaagactcctataattccatcattcaaaagcaatcactgttaactgaatttattgttttagacttttttcttgcatttatgtaaacctgacttttcagaattaggatttatactgtatacgatgttttgtgactgatatcagcatttagagccatacagagaatgtttttcattatgcttaagaactacataatgttccattgtgtgggtgtacaaagttgatccagttctctacatttgggcatttaggttattttcaatagtttgcattcaatagaacatattcttacaaataaaatctgtccatgtatccaaggatagttccatttgttttaagttttgattttatcactattacatcactataccaaatatcccccaaaagattataccagtaaatgtcttttaaaatataataataaataccagccgggtgcagttgctcacacctataatcccagcactttgggaggccgaggcaggcagatcacttaaggtcaggagtttgagaccagccttggtaacatggcaaaacccttctctactaaaaatacaaaaattagccggtcatgatggcggccacctgtagtcccagctactcaggaggctgaggcaggagaatagcttgaacccaggaggtggaggttgcagtgagctgagattgcaccactgcactccatcctgggcgacagagcaacgctctgtctcaaaagtaataataataaatatcatctccacactctgcatgcttgacattttcccatttttacaatgattccataggcataggttttatgaccataatcagatgagtaaactgaggtttgaggggttaagtaacctatcttaagtttatatagtgggtgaggggtggaactaggatttaaactcaggtggttctgctatagtatttttttcccattgtattacactatttttctatatcaaattgggtttccccacaaaatctaggtggaccaacttctgaatgtaaacattgctggctcagtcccctttgtctcacaggagtcaggcatcccctccctttgtcaggggtgtgtgtgtgtgtgtgtgtgtgtgtgtgtgtgtgtgtgtgtgtgtgtgtgtgtttgcttgcagtaatatctcctgtggcattctgtagagaggttacacatcagtcacaggtctgtgaactgccttaatgaacaaggttccctagcctagaataatcaatggaacaaaatccccatggacgctgccatttccactgttgccaaagacctacatggagaaggttcccaaggtgtcagatccgacacctgagttttctttataggtcacagttagcctagaatgtgtggtatgggtattgcctggacgcataaactagattgcttctaatatggatgtggtccaacaatctctgatgaatggaagtaaacatatcaaaagcttcagaggctgggacattaacatttttttgaggctactagtgttttttataaataatgaagaagggccaggcgcagtggctcacacctgtaatcccagcactttgggaggccgaggtgggcagatagagtgagctcagaagacccgcttgggcaacatggcataaaccccatctctacaaaaaatacaaaaaattacctgggcgtggtggtgggcgcctgtaatcccagctactcgggaggctaaggtaggaggatcacctaggcctggtgtggtgggtcacacctgtaatcctagcacttttgggggccaaggtgggctgattgcctgagctcaggagttcgagaccagcctgggcaacacggtgaaaccctgtttctactaaaatacaaaaaactagccgggtgtggtggcgggcgcctgtaatcccaagtactcgggaggctgaggcgggagaatcgcttgaaccagggagtcagaggttgcaatgagccgagattgtgccactgcactgcagcctggctacatagcaagacttcctctttaaaaaaaaaaaaaaaaaaaaaaaggtgggagagggctgagtcagtttgccttggaggcatgggggaggagaaggatgtgaacagggaagtgatctaagagcttccctaggaaggaaggacacccttttcctggaatgctctcctgctctgccacagctttcagtcaattatcactgcctttagaatgcttatcagcactccagcccttcagaagtgtccttctcctcctctggtgtcaaactccagagtttacttttggaattaaggtttattttccttaggttttaggaagtagcttttgaaccttagaagagtcagtttcctttactaactactgaatgaagttaggcattcaaaacttgggtagtcatgatttgaagtgtcacttgcggccaggcacagtggctcacctgtaatcccagcattttgggaggttgaggcgggcagatcacctgaagtcaggagttcaagcccagcctggccaacatagtgtctctactaaaaatattaaaaaaaaaaaaaaataaccgggcgtgatggcaggcgcctgtaatcccagctactctggaggctgagacaggagaagcacttgaatccaggaggcggaggttgcagtgagccaagattgcaccattgcactccagcctgggcaacagagtgagactccgttccccaaaaaatgaaatgtcaatttcattgagactgtatgaatgcctgacatgcacttgaaagtgatgtttattttataattttagcccttcttcactaccccaaactcccagtgcatttaaaaaatttattggcctagccattctcatggggtaatatatcatgaccatcaaaagatgacactaaagtgaatcctccatgtatagctgggctttctgccagccttagattctggagaagcaccccaggccagggagaacgggtgaagaggagaagcatttattgaaggtgctggtagccggagccctgagaccaacacagaatcgttttttctgaaggacaactcaaggacagttgagggctcttcacttccctcacatcagagggagctttgtgctcacgatgggcacggaaagggatgccagtaagcgatgcccctctatcatctcacaagacccaggtgaaacaggacattggttagggctgggacagggtcagtcagccttctcattttacagtggaggaagctgaggcttgagaggggaggtgacttgcctgaggtcacacagtaagtgatcagctgtcatctgagtgatttcttcaggtactctctctggctggacccagccagtgacaactacctgtggctcaagctgagtttgggactaaatggttttacaaggacctcaaagtatactctctctcttctagtaggacatggggaatactgactttgctgagagtaagggctcttttcccaggattgttctagatccccagatcactggaaccctgagcatagatactaggctttagcttcctggctaccacagagccacacactctcaggtagaaaaatccctaaactggctgggcatggtggctcatgccagtaatcccagcacttttggaggcccaggcaggtggatcacctgacgtcaggagttcaagaccagcctggccaacatggtaaaaccctgtctctacaaaaaaaaaaaaaaaatttagccacgcgtggtggcaagtgcctatactcccagctgcttggggggctgaggtggggggatcacttgagccagggaggtggaggctgcagtgagctgaaatcatggcactgttctttagcctgggctacagaatgagaccctgtctcaaagaaaaaaaaaaaaaaacccgaaccatgtttttaatttcttaaaactgagagtactaaatgctcaacgttcatgttgtgtgcataaaagtgagactgaaggatgaatgtgtggggtatggatagatgggatgtgaatgaagcagtctctgggtccaagctctcctggaaattcgtggaacagaccagtggtcccagatttttagatttcataggccagtaaaatttccctccagatttttggaaccaacaaaggatcatcaacttttttgccaagtaagaacgtttttaataaactaatgctgcctgctaccattaccacctgattcttttttttttttttttttttttttttgagacagtttcattcttgttgcccaggctggggtgcaatggtgcgatctcagctcactgcaacctccacctcctgagttcacgcagttctcctgcctcagcctcctgagtaggtgggattacaggcattcgccaccacacctggctcattttgtatttttagtagacacggggtttctccatgttggtcaggctggtctcgaactcctgacctcatgtgatccgcccacctcagcttcccaaagtgctgggtttacaggcgtgagccaccgagcccagcgccatctaattcttttgttgtggtaaaatatatgtaacataaaattaaccattttaactatttttatttttttaagttaaattgattatgtaatgtttttgagacagggtcacactttgtcacccaggctggagtgcagtgttgctatctcagctcactgcagcctcgacctcccgggctcaagagatcctcccacctcagcctcccaagtagctgggaccacaggtgcacgctaccatgcctggctaattttgtttttcttttttttttttttttgtagagatgaggtctcactttgttgctcaggctgatctctaacccctggactcaaacaatcctctcacctcagcctcccgaagtattggagttaagagatgtgagccactgtgcccggccaatttttaaatttgtaattgatgcataatggttatgtataatcgtcgggtacggtatgatgttttgatccacgcacacattatgtaacgaccaaatcatggtaattgctgtattgtatccatcactttaaatatttatcatttctttgtggtgcattttcaccaattttaagtgcacagttttgtagcataaaatttattcacgctgtgtagccatcaccaccatccatttcaccttccctgacaccttacctgttcaacgctaactcccccttctcccctcttccagccccttggtaaccactattctacagcttttcattttcaaaggatgttttattgtctttagtctcatcgtgtgaaaccttaagagaatttctttacggtggagaaaaagtaactttatgaagcccattcctttctctactctggagaggctggtgacccagccccaccattgcaggaatgagacgggattgcggggatatggcaggcacttggggtgctgagagtccaggtgaactgtgagctcaagcacccatgtcgggcttgggggaccagaagacacatcctgaaacagctgaagcctctactaattcatcagcaagtttagggagcggcaacttttccctgcccagctgctggcgtttccttccccatacaatttctgctgagtttgggggaggggaggttgttcgagaggccccagctgggagaggtggggggagggcgatacattcttttccttaaggaacctgaccgaactttaaggtcagagctcagtggagagtgggagctgcagggttacctctttgccgttgattcatctctccaccctcccccactcttaatgatctttccattacagaacccagaccaggaagtgcatgacaggtcgcagctgcagacacatggctgggaggcctgggctccgggccagtggtgggagagtctgagctcccctccagcagtgggacccctgcacacacacacacacacacacacacacacacaccactttaacaacttggtggaagatgttctttcttatgcactgtcacaggtgatgacgagttggactttgctttgagtttaggatgtgatttatattataataaaggcaggagaagacactccccctgccccggtccaacctgagtgtttagatccccccaacttacagtccacctaagtggtccttaccagatcctgggagctttctattatcgtgcagatgccccaacttcttttcccaaaataggacccacccaatatggccttagaagcttcccagggtatccggggcagttgctagtcacagtcttaatgtctccgaaatagtatgttttcctctctatgtttctattaaaatgtcagccccaaaacatgtttctgggtggaggtctaggtgcaacagcacagcctttgcaaacacagatagacttgggttcaagtcataatagatgagttgagcctctcatttttcagtcttcattggggatggctctttccatttgcaagttgttcaggaaatgttaattgaccctaaactgtgtcctagggggcagttgtcacacaggagtttctgtcttcaccaccagctgtgtccttggcttccttccctgaatctgccaaggctggattctggtgctaaatgtgaaatggtgacacaaacttctaggaactgtgagcttggacggccctcctccatagccgcagggcatctacctttgctcttcttggatgagtgaatgaacttccctctttccagagcaatgctttcttcctgtttagataggagggagagaagcaaagtgtattgggaataggttgagcgaaagagtgtagtaagagttttctgtacagctctgtccttaatgtatcagtaaacaatagggtgagaacttttgctggggagagaggaaggagggaaatttcttttcagacaactcttgggtgcattcctttgttaatcacttaattacagcccttctcccagtgaggtagtgaactccccattgtgagaggtagggaggaggtgggggacactggtgctgattggagaaaggtggcaaaatccctaggggaaaaaagtacagatttgaaggaggcatcagatgaatccgtgcatagaagcttgagccccaaactcagttctcaggctgcgttatcctttacgacacccagagtccctctgtcttttaagatccacacacaactctccaggccaatagctcttggcgcctgcgattcccaagtgggattctacacgtgtcttgctgcccagctcggggggatctgtttttggggggtctcggggcgggtgcagggtcctggctgtggctttggctagtgcaggcggctcggcactaaattacagtgacgaggtgggacgcacaaaaggccgaaatctttttttaataaaaacaaaacaaaactctgggccccaagcccctgggctgctgaatggccatggcttcctgtcaggattagccgggctgcctgggcctgtgtgctcggcctttctcctcaggaaatacctttagtaagccccggtggggtccccatggcaacgcacggggggacctgctggcagaggccattcagtctgccattgtcccccggcccctttgttgtgagctttattgccggccctctggcaaacacagcagtttgcaccgttttgtcaggctgaatgtggagtttttacattttaatgggctcttctggcagtggcccatttgcatgcaaaatgtcccctcttactcttttcactttcttcaatttaaaaaaaaaaaaaaagcccttctccaaatcccctgggtcggggggctggtggacgccattggccctgggtgtcaggccctgctaattgatttggtgctcccggctctctttccacacatacctgtgccccccatttttgcagctctccttctatttggggactccgagagttgagagaaacacatttttggggctctctccacccaaacccttgtaggatggcagctgtgacccgggatttcggtgagatgcttctgcactctggccgggtcctgccagccgaaggtaagttttcagttccatttcaaagccaaaatacgtaataaaaaaacctctgcagagggcccccggagccccgctgcgctgttctgtgctccttttaagttgctttcaaagccaccccgagttcctcccccacccacaattgccccctcatttatctctggggagtttataccaagactgtaaacattcctggaccaccagtttcccccatgttgctgaggagtttagcctttctctcctaattttcttaactcagaaatcaaaaagatggaatagggatgatagaaattgctaccctgagacatcatgctcatggaggatgcctggattttgttgggggccagttatccaagccctaagccctttggagtgtagaacgtagagtaggtaatacaaatacctactgtcagcccagcaccccagcaacatgagtaagtgcaagacacaggcatgaacattttcagctctagggaaaggcacattcatgttggggagaggtggagaatgcagtttggccagtctcagaagagtgagttttaaggcctaggaaagtgatggagatgattgcttgttggagagagagaaggagaaaggcatttaggggaagaaaaggaaaatgaaaggagcagtgaggatattggctccactggggaggtggaactggggtagtggccgaaccaggggtgggagaggacgtggttgagaggctccagaccagctggggctgtcatggagtgttgggggtctggagcagtcaggacttgaaagccgggacccttgtgagccctgtgcagtcctgaggatgtggcccaagggggagggcggaccagctcttttgcctcgtgttcttaatcttctcagtgggtcatcaggggtcatcagctgtaagctgtaatcaacggtgaggggctcgagaagagaaggtgtcaggtgactgctggggattgagctgaggacaggagaggcagggtgctgtctcctgtggcccaggcagagcggcacagacctggagtgggccacccctcatcaccccatgtgctgcgacagtgctggctggactgaaccctggaagagtacctggacacagtggaggggccaggacccagcagatgcagcctctagagcttgtccctgttttgtgactttgggagccatttttccatgtttaaatgggaaggaacacaagtcacctggtcacaaggaagcaggccctatgaaatattaagtgcaatgccaaaacagggcattgttactggtcttgagtctgccacaatcacaatgaacacctcccccattttctcacctgccacatttggacagccgagcctgctggactcgcaggggcaggagagtgcattttataattaaaagcactcaactgtaaggtaatgattgatatgagctatgggcttgaggaaatgagggaaggaggggaggataaggccaaagcaaccaacttcagaatctcacgggaggaggtaggatgcagggggtgccattagacagaatcaaagggctgaaccagaagggcttcctcacctggggaagtcaagacactgtgaagattgaggctgccttgcacagcggtaaagctggactctggatgtatgatgtatgtggattctggagaaccaggctacctgtgtttgaatcccagctctgccacttaacaacctagctgggccatcttggactaatcccaaatctttctgtgccccagtttccccctctgaagataataattcctttttttttttttttttgagacggagtctgggtctgtcacccaggctggagtgcagtggtgtgatttcggttcactgcaacctctgcctcctaggttcaagtgattctcctgcctcagcctcctcagtagctgggattacaggcgtgcatcaccacgcctggctaattttttgtatttttagtagaaatagggtttcaccatgttggccaggctggtctcaaactcctgatctcaggtgatccacccacttcggcctcccaaagtgctaggattacaggcattagccactgcactgggcccgaagataataattctaactcttaaatacttcacaagattctaagttaacacatgctgagaactatgctggtatgtagtaagcctccgcatccataggatagaaatcatagtaggatcaacctcataagtttcctatgaggatgaaatgggagggtctgtgttaaaagctttgtgcagcctatgggatatagtgagcgtgctggaaatattggccagtagtagtattgctgtttactcagatgtttatggatccctagataatatatgggaaggcacatggtaaattacaaagtgctatgcaaatgtgttgttattcttcactgggttcctgttaagttgtggggtttggggatggataacttccagaccagagtggctgctgtgggaccgggctggtgaagcggtatttcaaaatacattttcaggtgtgtttgtccatgtggcatgaatgccctgcattcatagtctctgcagagaggtgtgttccctgggatatctttggtggctctgttctatccctcaacttacaaattgaaatcattatttgttactgttttctcccatgaaccttctgttcctggccagctgtacagcctggcctcatctcccactgcccctcagaccagggtacagccatgcctgtaagcacttcattctcttctgttccccccagacatttcacttctcatctaaatcctctcttttcccttccccgtcattttgtccaacctctgctctcactgctgatacttttctttatgtttcatgacgtcagagcctgtgctagacctgcctgtacttggtcctgacattctccatttgtctcatgttgcagtataaaatcttaatccatattaaggtgctgtgcaaatctgagcacccctgttagggcaagacatatgccttctgggcctttgtttcacccatttctccttgcacagtgacaagggctcccagagtcacctaatggtagctatgttgatgaaagttccctgactcctccttggatttttgagaactggggtctcatcttgtcataagaatagcaaggtttgtatgggtttgggtctctgatggttcccatgactggtggaagacacagatttagaatcaagaattgggaggccgaggtgggtggatcacttaagttcaggagttcaagaccagcctggccaacatggcaaaactccatctctactaaaaatacaaaattagccgggcgtggtggcgcttgtctatagtcccagctactcgggactgaggcacgagaatcacttgaacctgggaggcggaagttgcagtgagccaagatcccagaactgccttctaaatgactgtgggagatttttgtccagtcctgctagaagcaaaatgctgtacctgttggcttgttggaagtacaagcctgcagtatttggggggaaagtaggaagggaagagggattcagtagggcctcattatcattaatcgtgttcctgaacttgaaagcaccatgggaaaatcccctcccacccctgcctctgtcctttctagctgcttccttgaggattatcaaaaagtgtgggtctccggtgggctcctaattccttcttaggggatagagacaccttagagaagcagggtaggtttgatgtatgaatccttgtcactcgcactaaaaggagcactggttgcagcctgcacaaattcccaaggtccacccgccagctgctttgacccaggaacctgcgtggtaatgagatcagcagcctgagttctcgaacgatgttcaaggcaaaccctaaccctgaccttcccactcctgttgatgagaacggtgactccattctattggcatcaaagcataaggccccttttttttcacaatgcactttttttgttgttgttgagacagtgtctctgttgcccaggctggagtgcagtggcaagattatagctcctgcagccttgagttcctgggctcaagggatcctccctcctctgcctcccaagtgcctggggactacaggcatgcaccactatgcctggctaatttttttatttttcgcagagacagggtctcactatgttgccagggctggttttgaactcctggcctcaagcagtcctcccaccttggcctcccaaagggctgggattacaggcatgagccactgcacccagtccgcaatgcactgttaacacatggcacctagagcctgtaatagtgaacagccagtctttttcagcctcaggctaggtcaccagggaatccagataccagatgccctccagcctccattccccacctcatctctcaggaaacagatgcacaaagcaagtgttttggtgctgcttccctcacagcatccccatgtgcattttgaggacaacctttgtatctgattccaattaatcaggttctccaggagttggaatgttggtttcaagtgactgaacaataaagtggctttcttcatctttcttggccagtccaataaaagtgtcaggtagcttttctcttgctaatggacacctaacgacaccctggcctgttggtcttgaccagagaaaggccagctcagggcagctggagctgaagaggcaaggacctttctaatgaggacataagtgagggacactggaaagaccaaaagagaatggaaagtactgacatggtagttgcagggtgctagtgagcagtcatgcccccaaatcagccaccttacatagaactccccaagttcagggccactggatggggttgtgacgcagtcaagcagggcccagaaagcatacaagcagttggtttcatctcctgtaagaaagtggcatcatccctgctttgtaaacggagaacctgacacacaccaagagcactcctagccgtggaaaaaagccgctagaacccgaggttagtctgatttttggttcctctgaaaattagcttttgctggatgctagattcagttctggacttactgagtagtctctgggtttttgacattgttaggcactgtgggaaaattataacaggtacgtctgcgctgagttgcttgctaattcctaggagagacttggacattttggacaattaagaagcaatacaggccaggcacggtggctcacgtctgtaatcccagcactttgggaggctgaggcgggtggctcatctgaggtcaggagttcgagaccagcctgaccagcatggtgaaaccccatctctactaaaaatacaaaattagccaggcgtggtggcacatgcctgtaataatcccagctactcgggaggctgaggcaggagaattgcttgaactggggaggcaaaggttgcagtgatccgagatcacgccattgcactccagcctgggcaacaagagtgaaattctgtctcaaaaaaacaaacaaacaaaaagaagcaatacagctctttgagaaagatgcagtcataagtggtgcagagttgcagtctgcccattcctgctcctcactcatcgctgttccgaacaagtcagccaggaagccgcactgcaccaaggcttttaaagataccagaaaacacctgtgaagctggaggtgaccattcaccaaattcgaatccctctaatgatccgcagcgtaaaatccctggagaaggtgtgtgctgacttgattcagaggaggaaaggaaaagaatgtctaagtgaagggaccagtttgaatgcctgccaagactttgagaatcactataagaaaatctccttgtggtgaaggttcagagacatgggatcgtttccagatgagaatccacaagctacccactgacttgcacagtccttctgagattgttaagcagttgacttccatcagtgttgagccaggaattgaggtggaagtcaccattgcagatgctcaaagtcaactattttaataaactgattagcggttgttataaaaaaaaaaaaaaaaagcagcagcaatatgggttgagcgcagcggctcacacctgtaatcccaacactttgggaggtcaaggtgggtgggttgcttgagtccaggagttcaagaccagcctgggcaacatttgaaattttaacttattttttaaaaaagaaagaaacattatacccaatatctgtcaattgatgactgcaatgtggtatgtctacacaattgaatattattaggtcattaaaaggaacaaagtgctgattctatgctataacatggaggaagtttgaacacatgctaagtgaaagaagccagtcacaaaagatcacatattgtatgattccattgatatgaaatatctagaatagccaaatccatagacagaaagcagattagtggttgcttagactggggataggggatggaggagtgactactatgggtcaggcattttttgaggggcgagggatggtaaaaatgttctaaagtgagattgtggtgaatgattgcacaactctgaatatacaaaaaccattaaatggatgaatattacagcatgtgaattacctgtctgctgtttaaataaaatagaaacaatacaaaatggaatgtaattgagtgtgaatttgtgtgattcaggcggtaactgttttacagaaaattagagatgagacattgatataaacaaggcttcctagtttcttgttttgttttaagacagggtctggctgggtgcggtggctcacacctgtaatcccagcacttgctaactgaagatgcaaggaccgaggcgggcagatcacttaaggtctggagttcaaggacagcctggctaacatggtgaaaccccatctctactaaaatgcaaaaataagccagccattgtggcatatgcctgtagtcccagctgctccagaggctgaagtgggaaaatggcttgaacctgggaggcagaagttgcagcaagccaagattgtgccactgcactccagactgggcaacaaagcaactctgtcttaaaaaaaaaaaagggtctttgtcatcccgtccagtggcatgatcatagctcaccgtagcctccaactcctgggctcaagcaatcctgtctcagcccactgagtagctgggactacaggcatgtgccaccaagtctggctagtttttaaatttttttgtagagacgaggtctcactatgttgcctaggctggtcttgaactcctgggctcaaatgagcctcctgcctcagcctccccaagtgctgggattgcaggcataagccactgcacccagcccctggacgttttggatggtggactttgagtagtttggggtaggaggactctggagtggcgctgacagtcctcaggaaggagtaagctttgccatgccagggaggatgcagccgtgctgaaagcatcccaactggggaggggggggggcgcggtggggagggacagcccctggtagagagaatggggctgggtggagagagtggaagccaattgcagggagtcttgaaggtgaggcagggatgtggattttactctgtacacagggtagattttgatcaggaaaataatgtcaagcacatgacagcttggaagcaggagtctgagctgcagccccagggaggccatttaaaagattatcccggctgggcgccatggctcatgccagcactttgggaggccgaggcaggcagatcacgaggtcaggagctttagaccagcctgaccaacattccccttctctactaaaaatacaaaaattagctgggcatggtggcgcatgcctgtaatcccagcaactcaggaggctgaggcaggagaatcacttgaacccgggaggcagaggttgcagtgagccgagatcgcagcacttcactccagcctgggcgaaagagcaaaactccatctcaaaaaaaaaaaaaaaaaaaatttatcccgagatggttccggtaaagggataggacagagcatacctgagccacgtttggaagggaaccggggtctaaacttgcatcaggaggaaagcgagctggttcttgaggcttttacagatcacgtatagtggagttttgtttgcacgttctggttgggacgggcaggaagttacggatccaagctggtatcagctagagcgggtctcaccagggccagtgttcctttgctgcattctcttggggggaaataaatgcctgggggttctctttgctacatttttgtctttgggagctgcttttttctctgggatcggctgcaataggccttgtgatgccagagggtaagaattcaagtttactcttgaccaatgggttgcacagatcacaagctgcaaaatatttaatcaccgaggtcatttgagggaaatgagatttgatcaatagaagtgtctgctctgttccttaagagttgagtctaaactgcttttctccttaccttcgtttggcaaaaccacagaccattaaaaatggaaagaataactttttctaaggcccacaaaagcttatttttaatcagttgtgtggtctactcacctttgtggtgttccccttgaccggactcacaaaaataaacgtgtgcaagcctagtggtttctgagcccttttaaagcagtacccctgtttctgacaactcttatttaagataaagcccatgggtcaatgcaggactgggtctgcaaccttggcccccccaagagaaaccactgtcagtccctgtcagttgctgatcatgatgcgcgggacacccattttcatttttaaggtttctagcggaagcctgttgagcacttgaggaagaccgtgtttcaaataagggggagtgaaagagaaaagggagagtagaaaggaaggcagtgaagagccagagtgactgcacgtgtggtatttattgagcaagcatttcttgagcaactcctgggcgccaggcatcgtagtaggtgctggggatttaaaggtaccgatgacacatcaccgcactcaggttcagaaagaggactgcccttcagtgtgacaggtgccaggagggggagggcacctaacccagactgggagtcagcaccgccctggaggagaagtcaccagctaggctgagacagaagagtgagtagtgagagctggacagaaaaaaatcaggggccctgtggccactggggcagccgtgagccacagcaggggctgagggagaacatgctgtttcagagccttatgcatcggggagcggcagtcgctccactgagtctcttagggtgaacaaatggtgagaaaagtcctctccaaggctgtgggcgggatgtgggtggtaggtgagaggtggaagatgccaggagtacatttgaacatcctaaaaggaaatagaaagttcatttcccctcgtgagtgcagaggggtgtgctcaggagatgggtaacagcccaggatggtgaactcaggtgtgtccgggccacgggccttcttgaacgcgtgcgggaagaggcactggtcaggggagggacaggtgctcttggtggtatcagatcttgtgaggtgcagacaccccggtgggtccagtgctcccacccagggacagagaaggatggggcacggggagggagagtggatggtggggggcctgagggtgtgcccagtcagagggctgaggagaaaggacctttgtgtgcgacagctcctgctgccagagcaagtgtgggttttatggcagctgtggcctcccgtcctaatatagtcaacagctccaaatcccctgccctgacacctgttagcgagaggttccctgagctgacctctccttgggctgcccccccagcatgtgcatctgacgcgtcgagggccagacccccaccctctccgaatcacacgcatcctggtcagcccccagttgacaaattgccttctctcgacttgggcaggggctgctggggttttgaggggcggggtttgttcagctgttgctagggaagggtgaggctgagctatcccaaaggaaatggggtgttcctctggcaagtggcaatcttggcaaagaactgagcatctggggagggggcaactccggacacaaagaagtcctggggagggccgacctttccccttaggatgggggaaatgaaatgcgcttaatgctgctacagctgcttcctaactttgcctctttcttcctttgacttttggaggagtggggtggaaaagagatgggggttcccaggcagccagctgttttccccactgacccatgctccaattcccactgccctggctcagtagcctccagtaagtgatgcccaggatggtgcggctccgtgtggccagcgtaattccctttgtctctcccctcctcccctctccctgtcttcctctctcgccccttggcttcccttcccggccccgtggtggctgcagcccagccctggggagcccctgtggaagtggagtccttcctggtccaccccggtgacctgctgcagcttcgctgtcggctgcgggacgatgtgcagagcatcaactggctgcgggacggggtgcagctggcggaaagcaaccgcacccgcatcacaggggaggaggtggaggtgcaggactccgtgcccgcagactccggcctctatgcttgcgtaaccagcagcccctcgggcagtgacaccacctacttctccgtcaatgtttcaggttggtagccaagccctgcccttgcccctccctagacccaccccctccagccctctctgccagtttcagaggaaggtgaacctcctccccctccgtgatctgcccccactctgcttcagaaactgctgcccactaacattgctccctgcctgccgcgtggcttggctctcagagaggtgactaggtggggtgggccccagggccggagatctggggcttccaggacacacctcggaggtgattgccagggctcttgggatgttaagaccctgtgatttttttccaccacagcttgcccagatctccaggaggctaagtggtgctcggccagcttccactccatcactcccttgccatttggacttggtactcggcttagtgattagaggccctgaacaggtggtggtatccctgctctgctggagaggaacccaggtgcaccgcaagggagctgtgcgagggcagccagggagccctggagctctgtgaacttgggaacttgccactcttagaatgtgactttcacaaaactaggagttgaggaagtggagctgaaattttctttatgccatttatgcacctcagggtgtggacttggcagcagatccccaaaggtgataggaaggactggagaaagatctggcatgaaccctgatgggtgaccacatgtgtatcaagcgtgttcttacaagaaataaatacttattggggagaggtgttggcagctgctggggtggtgggtgccctatctgctctgattaaggagggcagcccccaaaccttagtagacacatgctagaaaaattctgactgtggggtgtttagcccatcctttggaaatagcatctagccacagtgtgtctagacctgcctgggtttccctatagtcagccgtccaaagaagaatacaggttgcctggctccagcacacccaggtggcaccacaagttgagaaagcgcctttgaatgtaggacggaattaagttaaataggaacagctgaccctgatggaaccacccagtgtgaaggcttccaggcagtgggggcagtgcttcggggaaggaagcaaacacgcacaggaactgttcttaaacagtttccatcccaccaagagatcatcactaagggagcagtgggactgggatccccatggggagggtgtccgtgttcatctggaactgcactagccttggtgaaatctaggggtccctaggaggaacctcagtgccccttcttcttcccatagatgctctcccctcctcggaggatgatgatgatgatgatgactcctcttcagaggagaaagaaacagataacaccaaaccaaaccgtatgcgtgagacactgtttcctatcttactgccctttgggtctgggcattgggtttaagaggggaggggaaggctgaaaggggaggaagaggagggcacatggggtcacggtgcctgttctgctaagtgccaggcactgctcacaggtgttgggcagatgggcaagacacctccaggtcctggcctgggccctgctcctgagcctgaccagctgctcctctccaccctgcctgtctctcttggctttccccgggcagccgtagctccatattggacatccccagaaaagatggaaaagaaattgcatgcagtgccggctgccaagacagtgaagttcaaatgcccttccagtgggaccccaaaccccacactgcgctggttgaaaaatggcaaagaattcaaacctgaccacagaattggaggctacaaggtacgtgtgtgtgcatgcgaaagttagagtaatgggaacaggggaggccgagttaggaagtcctgattacatgcttttcatttttttaagtaatactttccacctatacaggttattcattaaaatttttaaatacaaaaaaatgcaaataaagtttaaacatttcttcagtcttctttctgtaatatggtttttacatagttgatcacatcatgtatgtaatttccttgccttgtcatttgttaacatgagtcttttcctgatatatttcaagcatgaatatttgaaacataatttttcatgactgtataagattccattattttaaaatcccataatttggctgggcatggtggctcacgcctaaaatcctatcactttgggaggccgaggtgggcggattgcctgagctcaggagttcgagaccagcctgggcaacatggcgaaacctcctctgtactaaaaatacaaaaaattagccatgtgtggtggcaggctcctgtaatcccagctactggggaggctgaagcaggagattgcttgaacccaggagacagaggttgcagtgagctgagatcacgtcatttcactctagcctgggtgacagagtgagactctgtctccaaaaaacaacagaaaaagtcctataatttaatgaactattttgtgatattaggtattttctggtttttcaccataataaataatgttgcagtgaatctctgtcagcatttttttaagcgtgcttccttaggacagattgttacaagtgaaattactaacttaaagggtgtaagcattttttttttttttttagacggagtctcactctgtcacccaggctggagtgcagtggtgccatcttggctcactgcaagctccacctcccaggttcatgccattctcctgcctcagcctcccgagtacctgggatgtgcagccaccattcccagctaatttttgtatttttagtagagacggggtttccccatgttggccaggctggtcttgaactcatgacctcaagtgatctgtccgcctgggcctcccaaagagctgggattacaggcttgagccaccgcacccagccagaaatattttaaattaattcaccatgcactcactacatgcaagacaccatgctttaaatgctgcaagatagcgttcctgcccataaaaattttgcagtctgataggaggcaaatgtccatgagcagctaccgtaaaaagtagactgtgatcagtgctttggtaggcagagaggaaagggtgagcacagttctgaccagagactggactggaggagatggtttttgaaatgagctgtcaaggacagtgggggctggattcttagtgtaataggagaggtgcacagttgggaacattcttggtgtatttgggagtgtttgcagaaggcacatctgtccggatcacgaatgatcttgaacgtcacagtggagacttctggagtctttacaccccatctgccagcttgcagagtgtgaacgggctggtaggggggcaatccacgccttgtcctagccaaccctgcagcctggggccctgtgccaccaggctctgatatggagggcaggtgccacggggtgccgacattgtcatggggcctgcattttcctctggaccctcaatgtatccctttggcatttcccctcaggtccgttatgccacctggagcatcataatggactctgtggtgccctctgacaagggcaactacacctgcattgtggagaatgagtacggcagcatcaaccacacataccagctggatgtcgtgggtaagagggcagaggcagcaggaggaatgagtttagtgggaagagccaggcttggagaacacagccggggtgtccaggtttcttaggggcagagtcaggatagcgattggcacttcttggctttgtcaccttgagcaggtcacttctcccttttgagcctcacttttcttatctgtaaaatagagttaagatcagacagtaacacggtcaaagctggttgtcactgtgaaattgaaggtgctgttcagagtctgtcctgaaggaggcgttgttggagaggtgttaaatgtagcgtaataggagctgtcgcttaatgctagcaagatgccaggctccttaaatacctgccctgtaatgctcatggcacacctgcaaggtgggcagtattagtctagccctgcacaggagcacaggcgcataggctcagagaggtcagacaccttgctaatgcagaactgcacacctgtgccaacttcagggcatcacaggagactctgggaagaacattgagcctcttggagctattaccgcaaccttttccttctaggagttctgaaactcactccctagagatcattgggtacagaatctctcagccagtgttcttcttgattatgatgatatggtctaagaaggagattgtggccaggagcagtggcttatgagctccaggtggcatgatgggattactcacgcctgtgatcccatcactttaggaggccaaggctggaggattgcttgaggccaggagtgtgagaccagcctgggcaacacagtgagaccctgtctctataaaaaaatttaaaaattagcctagtgcagtgtcatgtacttgtagtaccagctgagttaactgaggctactgaggtgggaagatcacttgagcccaggaattcgaagctgcagtgagctatgatgacacccttgtgctccagcatgggtgacagagtgagaccctgcctttaaaaaaaaaaaaggtaaaaaggagattctgatccaagaggttggggtaagatctgagattccgcgtttctaacaagctcctaggggatgctggtagcactgctcgtggaccacactttgaatagcaggagtcaaagtgactctggttttttaaggaggagcaggttgtgctgaggtctgggggtgcaactgaattagaaggttctccattaaagcatgagcgacttactgtgactgtaaatatgatgactgccttggggaggaggatcctgatggcttagggcctgaagagagggtgtccctttccccagctctgttttgagaggcttgggctcagcagaagtgctgggaggtttacaacccatcactgggaaagccaagtggggcgcaggtgagcccacccctctttagccatggcaaggtccccatgacaagtgcctcctctcccatcttccacagagcggtcccctcaccggcccatcctgcaagcagggttgcccgccaacaaaacagtggccctgggtagcaacgtggagttcatgtgtaaggtgtacagtgacccgcagccgcacatccagtggctaaagcacatcgaggtgaatgggagcaagattggcccagacaacctgccttatgtccagatcttgaaggtaatcatggcaccagtcttcgtgggccagtctactgggaaggagaccactgtctcgggggctcaagttcctgtgggcaggctcagttgcccccgaatgggatcattcctcacgcttcaggcacacacactccatctcagtagggatctagccacatcccccaggactagtaacagaggtcacaaagtggaggtgagctgggaacagagggctgcagggatgggtggtgctggtctgtaataagctttgagagcaacgtcactggggctttggggtcagctacacaaggaaggcatttggacccctgccttttcattgcccgaaaccagagcctttccaccaagcgtttcccagtcttagccctgtgtcctgagttacgtacgatctttctggcaaatggggtgcatgataagagcatctcttacgaagagttggaaaaacaaatgccatatataaattctaagccatatgaggacgaggagtaatggcattttcttcctttttcctctcactcccagacattcattgtccctgaatgctccattaatccagggaaggtaattgcctaaatctccagtggatctcgcaacaggaaggaaccagaagctgggaaagttgtttacctctttgtcccagagttagacctcatcctcccctagcttagctgtctcagagatatactggccctcccttctcttctctttgctgctggtgctaaaactgctctgtaggtcattggccactgtctccactcacaacccctgctccagtcctggagggagtgggttaaacacaaatagaacattccatttgaagcagtgattctttttttttttttttttttttaatcaaatgctttggacttttgaagtccacttgttctgtacttgtaaaagggaaagaaggccgggcgcagtggctcacgcctgtaatcccagcactttagatcacttgaggtcaggagtttgagaccagcccggccaacatggtgaaaccccatctctactaaaaatacaaaaattagctgtgcatagtggttggcacctgtagtcccagctactcaggaggctgaggcaagctaactgcttgaacccagaaggcagaggttgcagtgagctgagatcacgccactgcactccagcctgggtgacagagtgagtgagactctgcgttaaaaaaaaaaaaaaaaaaaaaaactaaaagggaaaggtaataaatctcacttaacatctcccttcgctccctgggcctgcctgaaagttacacgggagcaacgtgcgtggccacatctcagctttgcccaactgactggtgtgtcgttggtttgttccagcattcggggattaatagctcggatgcggaggtgctgaccctgttcaatgtgacagaggcccagagcggggagtatgtgtgtaaggtttccaattatattggtgaagctaaccagtctgcgtggctcactgtcaccagacctgtggcaaaaggtaatggggagatggatgggaccctgtgctggggatttgatgtaggccccaagctgctggggcaggcggggaagccagtactggactgtccttgccaccctactgtatttctagtgcccagagccatggaaaaatacccggcctgggaggctggtttggtttggtattgtgttggtgtctgtgggttccctctctgccttctgtgtgttccttggctttgtgtggatccatgtgaggactcacggggacacggttttgctgtgttacaaatggtacttcagactgaagttgtgagtgagtggtgattaagagaaggggccataggccaggcacagtggctcacgcctgtcatcccagcactttgggaggctgaggtgggaggatcgcttgaagccaggagtttgagaccagcctgggcaacatagcaagaccccatctctacaaattaaataaattagccaagtatggtggcgtgtgcctgtagtcccagctagtctgaaggctgaggcaggaggattgcctgagcttaggtcgaggctgcagtgagctatgtttatgccactgcaccccagcctgggttgacagaatggtaccccatctcttaaaaaagagagagaaggggttaggcattcccttgcatactcgcatctgctggctgtgtatgcacatgtgcgtgtgtgtatgcgtgtgcatgtgtgtgtctgcagcccccgccatccctcctgtgttcaccttctggctatctttacctgaaaccaaacagcccctgcccgccggccccatttctccatgccgctcaccgcccgcatgctcggatgggccagtggctgccagcatctggtgaagggtcgtaaccagccatcgtcttctcaggtctgccggagttcttccctcagggtctcaccctcttcctctaacaggttttgctgcctggtggttttcgtttgttccttgttgcaaagaagatgtcagggagcatttcttcctctagtcccccttctttctgtctccttcccttgctctgcgtctcttagaggtctcatgtcctgtgcttgtccattttgcttccgttgtctcttctagactgctggagttaataccaccgacaaagagatggaggtgcttcacttaagaaatgtctcctttgaggacgcaggggagtatacgtgcttggcgggtaactctatcggactctcccatcactctgcatggttgaccgttctggaaggtacacactgtaacttctcctctcgatgtcctgccctcgccacgggcacggggggagcatgcatttccaggcttggggagacacagaggcaggagagctggaagaatgggctcctgcctgcctggtgccacatcctgccccagctttgagggctgaatcctctcagctcagagaagagcttccctagttttgcaggcgcacggaggcctcccacccgtacacctgcctctgctctccccctggccattgcaatgcatgcccgggatctgggtttaccctgcagcccgactcctccagggcaggctccttccgtccttgggtccagcagcctcccccctccgctgggtactgagcatctgaaaagtctcagatagggccctacacctcttctcccttctcaagtgctcagcccaggggtggggcttgctgcttgcaaagagcagcccaccctcctgtactgccatcctattgcctttgaagaaggaggtcagcctggacaggtgaactgagttgccttcagaaaggcctgtctcaggcagccgcagcaggcttcacgatgtccatgtatcctgtttgcctgctgccgtctctcctctcccaagaggggaggtctgcgtgttgagccagggaggaaggagcctgcagcctgctcagggtggtggctggtgactgcggggccagggcttgctgctgtctctcggaatgtcctgcatgtgggtctggctgttcctgctggcactgccctcttctctctcccctcctttcccactctgccctgcttgcccgtcagggtctccggatgcccctgctggaggcagagaagcgttctgtttttatcatcgtccctgtcttggtcctgtccgtgctccccatgtgctcccaatcagttgtcttcgttcctcaacatcagggaaagaaaaaacagcaacacttctccctgtcatcagctctgctgtctccttgtcaggccttgggacgttctctgggctcagtctagggtcgtgcctcatgcctcatgcctctctgggaaggttcccaggggcgccgcctccatggttggctggtgggttttaaaggggaaggttgggaggaggcctgtggaaggaggagggccgtccacacccgtggggcaaagcgtgttccatgaaaccagtgctgtgcgtgctgggatgaaagcctcccagcctctcgtgctgaagggaaaggtggaccgaactggcttagctgctgtggcaatggggtggggggtgagtcctaatcagaaggtgggagaagagaataacaaaatggaactccgccccctgccgccacatttccttaagttttaggagttggggcctatgagtagaatttgaaagaactaccaaaaaagcttatttttggaaattaagtcagctttgcctgtggtttggctaggaataaatatttacctgtgtgcccctacagagatgacacagacccaaagtgggacattgagcaaggcacaggctggttcccctcctgtcctctgtcctcattctgtgagtgccaccatcaccaggtactgtggcctgcagaaataaacgaggcaccaaccctgccctcagggaccccgtgtcttcttagggacagaggactcagaaacatctgtgtccccgcatgttaagtgcatgcacacagtgctgaggctttgcagagaagggccatggctccctgaggagaccaagaaaggcacatagaagtgacttctcagctggcccttgcaggatccctgggtgcctgtacctctccagtccagctgagcaaggaggctcaggaattaatgaagatggggcttgtgtagcacgatggttctaggccatcccttttccatggctcaagtccattgaaggcagcctccaaaatcagggggttgcctgatcctcctagtgccacaatcccagtcctagctagaacttgccatggttcttctccctaaaagttcccaggggacaggagacaggtgttgcttttctaatggagcgggacctcgcatggacggggccctccaagcctgctaacaccctgttcgcactgactcagccctggaagagaggccggcagtgatgacctcgcccctgtacctggagatcatcatctattgcacaggggccttcctcatctcctgcatggtggggtcggtcatcgtctacaagatgaagagtggtaccaagaagagtgacttccacagccagatggctgtgcacaagctggccaagagcatccctctgcgcagacaggtaacagaaagtagatgggggatttgcacactcagcaccacctctctctctgggcctctaatgccctgccctctccattgtccctaatttatagctttgggccttattttctggcttctgggcaaggcacagtggaatatcatgaactaagtgctctagagtctgtttcaagctagtgtagcccgtgaatttcctgcaccctccatatcacactgcaagtcctccggactcctgggacatggattgggaggaagtcctatttggacagaatgtgcagccaatagcatgaatttgaactgtccccaagggctgcttagaagtgcagagatgcagggtagagaagagaactgtttgtattagtccattttcacactgctgagaaagacatacccaagaccgggcaatttacaaaagaaagaggtttaatggactcacagttccacgtggctggggaggcctcacaattgcagaaggcaaaaggcacgtctcacatggcggcagacgagaagagagcttgtacagggaaactcccctttataaaatcatcagatctcgtgagatttattcactatcacaagaacagcacagggaagacctgcccccatgagtcaatgacctcctaccaggtccctcccataacacgtgggaattcaagatgagatttgggtggggacacagccaaaccatctcagccataccatacccttgtcccctgtgtgcccacccttccccacgggaggaaatggtacagatggcacaggtgtgtgcaagaatgaccgttccctcagaagcctgtgctcattctggaaggtgctttgggagttaggaatccataagctaaggcaaagtatttgcaaagagtcaggagaacagagttgttactgcaatgatcagttataaaatgtcaagctggaagaggtgcatttggtctgcttattttaaaggtgagtgaagtccagaaaggccagcttgtggcagaaataggtcagtcctagaagttgggcctcctggcctaccatggtctttggaccactctgtgttgaggaaagaacatcagatacacagacatgtgcctctgccattgttgggaagccctgactaagaatgggaaggagtcaccccgtcccccctccttgctctagggtgaccccactcttccttgcaggtgtctgctgactccagtgcatccatgaactctggggttcttctggttcggccatcacggctctcctccagtgggactcccatgctagcaggggtctctgagtatgagcttcccgaagaccctcgctgggagctgcctcgggacaggtaataatactttgactcccaactttttgaaggcattccttgcttgctattctagtggtggaaggtgtgtatactaacaccttctgggcggtgaaggttcatgaaatgcctgcagaaacattcattccactttctgctcgcagttgggtgaaatacagagaggtggagatggggtgcctctcaaggtttgaacttcaccagccccaacttatgccactctctgtttcccccgaaagactggtcttaggcaaacccctgggagagggctgctttgggcaggtggtgttggcagaggctatcgggctggacaaggacaaacccaaccgtgtgaccaaagtggctgtgaagatgttgaagtgtaagtgatgcttctgtccttgcaaagaaaatcttgtcccattccaagcaaacagcaggcctcgggcccagcagaacagcttctctggtgcctttgctgcccacacctgctccgctgcctgcttggggttacctgggagtggagggggtgttctgcaccttgagattgttctatgacgtcactctgttccttggcgtcaacctgggctgtggtcaggtgtttatcctggatccatcgcttgcaggctttcctcaccacatccctgcccactcactaccacctattgcaacaacggctcccatgagagggaagagaaaacaagtttggatgaagtggggaggagagaatcaagtcccagggaaaagcagcccctcgacacataccccactcccttagcctttatcctgccctcctcccttcccaagtaaatgagtctcaacgtgttctttaaagcggacgcaacagagaaagacttgtcagacctgatctcagaaatggagatgatgaagatgatcgggaagcataagaatatcatcaacctgctgggggcctgcacgcaggatggtgggtgccggccagactggctttccctgcccagcggggagaagatctgagctggggtatcagtcccaaggcctctctcagccacagctagggaagggggttaagagaggctgctttggcagaggtttaaaatgtgttatctcgggatctgggctccgctcattggtgttcattcaggaatacagatacctagattcacacacgtggtgtgttaacagaggcagctgagtaattatggtctaagagcgctcaggctgggtgcagtggctcatgcctgtaatcccagcaatttgggaggccgaggcaggaagatcacttgagatcaggagttcgagaccagtctggtcaaaatggtgaaaccccatctctactaaaaaatacaaaagttagccaggcatggtcacgcatgcctataatcccagctactcaggaggctgacgcataagacttgcttgaacccgggaggtggaggttgcagtgagccaagatcacgccattgtactccagcttgggagatactcccgctgtctcaaaaataaaataaataaataggccaggcacagtggctcacgcctgtaatcccagcaccttgggagggtgaggcgggtggatcacttgaggtcaggagttggagaccagcctggccaacaggtgaaaccccatctctactaaaaatacaaaaagtagccgggcgtggtggcgcatgcctgtaattccagctactcgggaggctgtggcaggagaatcgtttgaacacgggaggcggaggttgcggttagccgagatcgcgccattgcactccagcttgggcaacgagcaaaactccatctcaaaaaaaaaaaaaaaaaaaaaaaaaattagccaggcattgttcatgcctgtaatcccagctgcttgggaggctgaggcaggagaatcacttgaatccagaaggcagaggttgcagtgagccgaaattgcgccactgcactccagcctgggcaacagagtgagactccatctcaaaataaacagacaaactggggctcttaccccaatgttgctcgggaattttctggactatgctgggagtaattatttctctgattttttttgggtagtagaatggatttcccaggtcccctaagaggaggcaggagatgggaggttggccggggtgtgctgctgggggtggggtttctttgaggtgaagccaaacctgctcacctgctgctggccccatggcctcttctcctgtgcctgcaggtcccttgtatgtcatcgtggagtatgcctccaagggcaacctgcgggagtacctgcaggcccggaggcccccagggctggaatactgctacaaccccagccacaacccagaggagcagctctcctccaaggacctggtgtcctgcgcctaccaggtggcccgaggcatggagtatctggcctccaagaaggtgtggaacctgaaggctcccctgggtaatgccagggtgggaacagagcccccctagtcttccagcctgtgacttatcatcttgtggtggcgttgtggatgcactgagcactggccctgtgtgccctgtgtgttgtcttaggctctctgggaactgcagagtcaggagcaccagtgtagccaggtggccttggggtcagactgatgcagggtccgatctgtgcactgccactttctgcgtagcctcaggcagctacttagcatcttaaaattcttcaaatacaaaataataataatatcagctgggtgcagtggccaaggcgggaggattgcttgagctcaggagtgtgagaccaggttgggcaatatattgaaaccccgtctttaaaaaaaaaaaaaaaattaaaaaattagctgggtgtggtagtgcgtgccgatagtcccagctactcgggaggctgaggtgggaggctagcttgagcccaagagtttgaggctgcactgagccatgatcacaccactgcaccccagccggggcgacagagcaaggccctgtctcaaaagaaaataaagtataacaatacctgttgtagaattgttatgaagataaaatgaaactgtctgtgagtgttgagtgcagtgtttggtgtgtaagggctggcctggtttgagcccagccccatgtggacttgctgtgctgggaggcaggacctaggagcatgcatcgctgcagacgcagcagaggcataaggggccagtctttggggaaggaagggaggagcgcttgctgtgatgagaagcctggagctggcagagaatgttagaagagggaaagcaaaggttcggggggcagagcagtgtggcagaagttctatgagacaagtcggctagttgcatgggtggcggccgcccagagccttccagctccctcacctccccgcctcccgctctcccttcctccttcctcagtgcatacaccgagacctggcagccaggaatgtcctggtgacagaggacaatgtgatgaagatagcagactttggcctcgcacgggacattcaccacatcgactactataaaaagacaaccaacgtgagtgccgacaaggccgccctgtgctggtggtttcatctgagaagcaaggagtggggtgggctgagaacccaccccccagtcccttcccacctgtgccctcatggccctgcctggggccactccaacctcccctgtgctgctttcagggccgactgcctgtgaagtggatggcacccgaggcattatttgaccggatctacacccaccagagtgatgtgtgagtttgtaatagcaattgccagggaggtgtgggatagagagcttctagcactgtagagtcctgctttctccctggactgaggagtcctctttctgccccagagagaaaaacaaaacattgtctgtggccattccctctgctccagatgttgaaaggctgatctgttctccatgctgtctcctggcactgccctgggtagaggatttgtgctgggggaggggaggcggagaagctctaacaccctgtggctctccgcccatttgcaggtggtctttcggggtgctcctgtgggagatcttcactctgggcggctccccataccccggtgtgcctgtggaggaacttttcaagctgctgaaggagggtcaccgcatggacaagcccagtaactgcaccaacgagctgtaagcccgaggagatgtcggaggccctgagccaggccttggggcaagagtgggcttgaggggcagggggctagactagagagtatccatctccaggagacgtccctgaccttacagtcctgccgcaggtacatgatgatgcgggactgctggcatgcagtgccctcacagagacccaccttcaagcagctggtggaagacctggaccgcatcgtggccttgacctccaaccaggtaaggctgcccgtgccagagccagagctcaggccgtccccactgcgtgcacgcacctccctgagcagggaggaggggcccggcccatcgctgcttcctctcgcccatcacaggagtacctggacctgtccatgcccctggaccagtactcccccagctttcccgacacccggagctctacgtgctcctcaggggaggattccgtcttctctcatgagccgctgcccgaggagccctgcctgccccgacacccagcccagcttgccaatggcggactcaaacgccgctgactgccacccacacgccctccccagactccaccgtcagctgtaaccctcacccacagcccctgctgggcccaccacctgtccgtccctgtcccctttcctgctggcaggagccggctgcctaccaggggccttcctgtgtggcctgccttcaccccactcagctcacctctccctccacctcctctccacctgctggtgagaggtgcaaagaggcagatctttgctgccagccacttcatcccctcccagatgttggaccaacacccctccctgccaccaggcactgcctggagggcagggagtgggagccaatgaacaggcatgcaagtgagagcttcctgagctttctcctgtcggtttggtctgttttgccttcacccataagcccctcgcactctggtggcaggtgccttgtcctcagggctacagcagtagggaggtcagtgcttcgtgcctcgattgaaggtgacctctgccccagataggtggtgccagtggcttattaattccgatactagtttgctttgctgaccaaatgcctggtaccagaggatggtgaggcgaaggccaggttgggggcagtgttgtggccctggggcccagccccaaactgggggctctgtatatagctatgaagaaaacacaaagtgtataaatctgagtatatatttacatgtctttttaaaagggtcgttaccagagatttacccatcgggtaagatgctcctggtggctgggaggcatcagttgctatatattaaaaacaaaaaagaaaaaaaaggaaaatgtttttaaaaaggtcatatattttttgctacttttgctgttttatttttttaaattatgttctaaacctattttcagtttaggtccctcaataaaaattgctgctgcttcatttatctatgggctgtatgaaaagggtgggaatgtccactggaaagaagggacacccacgggccctggggctaggtctgtcccgagggcaccgcatgctcccggcgcaggttccttgtaacctcttcttcctaggtcctgcacccagacctcacgacgcacctcctgcctctccgctgcttttggaaagtcagaaaaagaagatgtctgcttcgagggcaggaaccccatccatgcagtagaggcgctgggcagagagtcaaggcccagcagccatcgaccatggatggtttcctccaaggaaaccggtggggttgggctggggagggggcacctacctaggaatagccacggggtagagctacagtgattaagaggaaagcaagggcgcggttgctcacgcctgtaatcccagcactttgggacaccgaggtgggcagatcacttcaggtcaggagtttgagaccagcctggccaacttagtgaaaccccatctctactaaaaatgcaaaaattatccaggcatggtggcacacgcctgtaatcccagctccacaggaggctgaggcagaatcccttgaagctgggaggcggaggttgcagtgagccgagattgcgccattgcactccagcctgggcaacagagaaaacaaaaaggaaaacaaatgatgaaggtctgcagaaactgaaacccagacatgtgtctgccccctctatgtgggcatggttttgccagtgcttctaagtgcaggagaacatgtcacctgaggctagttttgcattcaggtccctggcttcgtttcttgttggtatgcctccccagatcgtccttcctgtatccatgtgaccagactgtatttgttgggactgtcgcagatcttggcttcttacagttcttcctgtccaaactccatcctgtccctcaggaacggggggaaaattctccgaatgtttttggttttttggctgcttggaatttacttctgccacctgctggtcatcactgtcctcactaagtggattctggctcccccgtacctcatggctcaaactaccactcctcagtcgctatattaaagcttatattttgctggattactgctaaatacaaaagaaagttcaatatgttttcatttctgtagggaaaatgggattgctgctttaaatttctgagctagggattttttggcagctgcagtgttggcgactattgtaaaattctctttgtttctctctgtaaatagcacctgctaacattacaatttgtatttatgtttaaagaaggcatcatttggtgaacagaactaggaaatgaatttttagctcttaaaagcatttgctttgagaccgcacaggagtgtctttccttgtaaaacagtgatgataatttctgccttggccctaccttgaagcaatgttgtgtgaagggatgaagaatctaaaagtcttcataagtccttgggagaggtgctagaaaaatataaggcactatcataattacagtgatgtccttgctgttactactcaaatcacccacaaatttccccaaagactgcgctagctgtcaaataaaagacagtgaaattgacctga

SEQ ID NO: 17 - RNA, 5917 nt, Homo sapiens
agaugcaggggcgcaaacgccaaaggagaccaggcuguaggaagagaagggcagagcgccggacagcucggcccgcuccccguccuuuggggccgcggcuggggaacuacaaggcccagcaggcagcugcagggggcggaggcggaggagggaccagcgcgggugggagugagagagcgagcccucgcgccccgccggcgcauagcgcucggagcgcucuugcggccacaggcgcggcguccucggcggcgggcggcagcuagcgggagccgggacgccggugcagccgcagcgcgcggaggaacccgggugugccgggagcugggcggccacguccggacgggaccgagaccccucguagcgcauugcggcgaccucgccuuccccggccgcgagcgcgccgcugcuugaaaagccgcggaacccaaggacuuuucuccgguccgagcucggggcgccccgcagggcgcacgguacccgugcugcagucgggcacgccgcggcgccggggccuccgcagggcgauggagcccggucugcaaggaaagugaggcgccgccgcugcguucuggaggaggggggcacaaggucuggagaccccggguggcggacgggagcccuccccccgccccgccuccggggcaccagcuccggcuccauuguucccgcccgggcuggaggcgccgagcaccgagcgccgccgggagucgagcgccggccgcggagcucuugcgaccccgccaggacccgaacagagcccgggggcggcgggccggagccggggacgcgggcacacgcccgcucgcacaagccacggcggacucucccgaggcggaaccuccacgccgagcgagggucaguuugaaaaggaggaucgagcucacuguggaguauccauggagauguggagccuugucaccaaccucuaacugcagaacugggauguggagcuggaagugccuccucuucugggcugugcuggucacagccacacucugcaccgcuaggccguccccgaccuugccugaacaagcccagcccuggggagccccuguggaaguggaguccuuccugguccaccccggugaccugcugcagcuucgcugucggcugcgggacgaugugcagagcaucaacuggcugcgggacggggugcagcuggcggaaagcaaccgcacccgcaucacaggggaggagguggaggugcaggacuccgugcccgcagacuccggccucuaugcuugcguaaccagcagccccucgggcagugacaccaccuacuucuccgucaauguuucagaugcucuccccuccucggaggaugaugaugaugaugaugacuccucuucagaggagaaagaaacagauaacaccaaaccaaaccguaugcccguagcuccauauuggacauccccagaaaagauggaaaagaaauugcaugcagugccggcugccaagacagugaaguucaaaugcccuuccagugggaccccaaaccccacacugcgcugguugaaaaauggcaaagaauucaaaccugaccacagaauuggaggcuacaagguccguuaugccaccuggagcaucauaauggacucuguggugcccucugacaagggcaacuacaccugcauuguggagaaugaguacggcagcaucaaccacacauaccagcuggaugucguggagcgguccccucaccggcccauccugcaagcaggguugcccgccaacaaaacaguggcccuggguagcaacguggaguucauguguaagguguacagugacccgcagccgcacauccaguggcuaaagcacaucgaggugaaugggagcaagauuggcccagacaaccugccuuauguccagaucuugaagacugcuggaguuaauaccaccgacaaagagauggaggugcuucacuuaagaaaugucuccuuugaggacgcaggggaguauacgugcuuggcggguaacucuaucggacucucccaucacucugcaugguugaccguucuggaagcccuggaagagaggccggcagugaugaccucgccccuguaccuggagaucaucaucuauugcacaggggccuuccucaucuccugcaugguggggucggucaucgucuacaagaugaagagugguaccaagaagagugacuuccacagccagauggcugugcacaagcuggccaagagcaucccucugcgcagacagguaacagugucugcugacuccagugcauccaugaacucugggguucuucugguucggccaucacggcucuccuccagugggacucccaugcuagcaggggucucugaguaugagcuucccgaagacccucgcugggagcugccucgggacagacuggucuuaggcaaaccccugggagagggcugcuuugggcaggugguguuggcagaggcuaucgggcuggacaaggacaaacccaaccgugugaccaaaguggcugugaagauguugaagucggacgcaacagagaaagacuugucagaccugaucucagaaauggagaugaugaagaugaucgggaagcauaagaauaucaucaaccugcugggggccugcacgcaggauggucccuuguaugucaucguggaguaugccuccaagggcaaccugcgggaguaccugcaggcccggaggcccccagggcuggaauacugcuacaaccccagccacaacccagaggagcagcucuccuccaaggaccugguguccugcgccuaccagguggcccgaggcauggaguaucuggccuccaagaagugcauacaccgagaccuggcagccaggaauguccuggugacagaggacaaugugaugaagauagcagacuuuggccucgcacgggacauucaccacaucgacuacuauaaaaagacaaccaacggccgacugccugugaaguggauggcacccgaggcauuauuugaccggaucuacacccaccagagugauguguggucuuucggggugcuccugugggagaucuucacucugggcggcuccccauaccccggugugccuguggaggaacuuuucaagcugcugaaggagggucaccgcauggacaagcccaguaacugcaccaacgagcuguacaugaugaugcgggacugcuggcaugcagugcccucacagagacccaccuucaagcagcugguggaagaccuggaccgcaucguggccuugaccuccaaccaggaguaccuggaccuguccaugccccuggaccaguacucccccagcuuucccgacacccggagcucuacgugcuccucaggggaggauuccgucuucucucaugagccgcugcccgaggagcccugccugccccgacacccagcccagcuugccaauggcggacucaaacgccgcugacugccacccacacgcccuccccagacuccaccgucagcuguaacccucacccacagccccugcugggcccaccaccuguccgucccuguccccuuuccugcuggcaggagccggcugccuaccaggggccuuccuguguggccugccuucaccccacucagcucaccucucccuccaccuccucuccaccugcuggugagaggugcaaagaggcagaucuuugcugccagccacuucauccccucccagauguuggaccaacaccccucccugccaccaggcacugccuggagggcagggagugggagccaaugaacaggcaugcaagugagagcuuccugagcuuucuccugucgguuuggucuguuuugccuucacccauaagccccucgcacucugguggcaggugccuuguccucagggcuacagcaguagggaggucagugcuucgugccucgauugaaggugaccucugccccagauagguggugccaguggcuuauuaauuccgauacuaguuugcuuugcugaccaaaugccugguaccagaggauggugaggcgaaggccagguugggggcaguguuguggcccuggggcccagccccaaacugggggcucuguauauagcuaugaagaaaacacaaaguguauaaaucugaguauauauuuacaugucuuuuuaaaagggucguuaccagagauuuacccaucggguaagaugcuccugguggcugggaggcaucaguugcuauauauuaaaaacaaaaaagaaaaaaaaggaaaauguuuuuaaaaaggucauauauuuuuugcuacuuuugcuguuuuauuuuuuuaaauuauguucuaaaccuauuuucaguuuaggucccucaauaaaaauugcugcugcuucauuuaucuaugggcuguaugaaaagggugggaauguccacuggaaagaagggacacccacgggcccuggggcuaggucugucccgagggcaccgcaugcucccggcgcagguuccuuguaaccucuucuuccuagguccugcacccagaccucacgacgcaccuccugccucuccgcugcuuuuggaaagucagaaaaagaagaugucugcuucgagggcaggaaccccauccaugcaguagaggcgcugggcagagagucaaggcccagcagccaucgaccauggaugguuuccuccaaggaaaccggugggguugggcuggggagggggcaccuaccuaggaauagccacgggguagagcuacagugauuaagaggaaagcaagggcgcgguugcucacgccuguaaucccagcacuuugggacaccgaggugggcagaucacuucaggucaggaguuugagaccagccuggccaacuuagugaaaccccaucucuacuaaaaaugcaaaaauuauccaggcaugguggcacacgccuguaaucccagcuccacaggaggcugaggcagaaucccuugaagcugggaggcggagguugcagugagccgagauugcgccauugcacuccagccugggcaacagagaaaacaaaaaggaaaacaaaugaugaaggucugcagaaacugaaacccagacaugugucugcccccucuaugugggcaugguuuugccagugcuucuaagugcaggagaacaugucaccugaggcuaguuuugcauucaggucccuggcuucguuucuuguugguaugccuccccagaucguccuuccuguauccaugugaccagacuguauuuguugggacugucgcagaucuuggcuucuuacaguucuuccuguccaaacuccauccugucccucaggaacggggggaaaauucuccgaauguuuuugguuuuuuggcugcuuggaauuuacuucugccaccugcuggucaucacuguccucacuaaguggauucuggcucccccguaccucauggcucaaacuaccacuccucagucgcuauauuaaagcuuauauuuugcuggauuacugcuaaauacaaaagaaaguucaauauguuuucauuucuguagggaaaaugggauugcugcuuuaaauuucugagcuagggauuuuuuggcagcugcaguguuggcgacuauuguaaaauucucuuuguuucucucuguaaauagcaccugcuaacauuacaauuuguauuuauguuuaaagaaggcaucauuuggugaacagaacuaggaaaugaauuuuuagcucuuaaaagcauuugcuuugagaccgcacaggagugucuuuccuuguaaaacagugaugauaauuucugccuuggcccuaccuugaagcaauguugugugaagggaugaagaaucuaaaagucuucauaaguccuugggagaggugcuagaaaaauauaaggcacuaucauaauuacagugauguccuugcuguuacuacucaaaucacccacaaauuuccccaaagacugcgcuagcugucaaauaaaagacagugaaauugaccugaaaaaaaaaaaaaaaaa

SEQ ID NO: 18 - protein, 822 aa, Homo sapiens [sequence omitted]

SEQ ID NO: 19 - DNA, 4424 bp, Homo sapiens
tttaaagaaaggcagccggcgaaaagaggcaagagaggagaagaaagagaaaccaggggggcgaggcgccgtccaatgacaaagcccaggggtgggcgccggccgccatcttgtaccgggcagcaggatattcgcccgcgtcctccgccctcggagggggaggggcggcggcggaggcgagaaaagtagcgagagacgccagcagcagccgccgccgcggagccaacgcggactgggacggcggcggcagtagtgggacccggcgagcgtgagtggcccggagcggccttcgatgcggcgcagtatgaagaggcggcggcgccggcgcccggtcgccccggccacggccgcccggggcggcgactttagggcagaagacggggctgggttggaggcgcgggaggagaaggtggtgtactcgcggtcgcaactgtcgctggctgacagcaccaaggcgctgggcgacgccttcaagctcttcatgccccgcagcacggagttcatgagctcggacgcggagctctggagcttcctctgcagcctcaagcaccagttctccccgcacatcctgcgcagcaaggacgtctacggctactcctcctgccgggccctggtacccgaccccccggggccccctacagcccgcggccaggcgcgccggccggttccgcgcgcagcggccaggaggaggcgccgcggagcccgggcggccgctgcccgcaggaggaagccccggccgccacccccaccgccgccgccccccgaggagagctgcccggccaagcccgtggcccccgggccctgcttcgggggccgcaccttggaggagatctggagggcggccaccccgacgctgaccaccttccccaccatccgcgtcggcagcgacgtgtggggcgagcgcagcctggcggcagcgcggcgcagggcgcgccaggtcctgcgagtgaacctggaacccatggtgaggctccgccgcttcccggtgccccgggcatgaggtgcggcctccagggcgcctcctgccggccccgaccttgggacaggccttccgcccggaggaatgaacaagtgtcagtcgagtgtttacagatccggccaggaccccggcccccaatgcactttacgcgcgaagaagttgccggatggttgtccctgtcccgggccgcggcgcggtcgtcttggacgctggggcaggtgtgccctctgctgcctcccgtacccggcctgcggagggaggggacagctggacccgcaggggaggtccctttcttcctgaccaccgattgagacgtctccaggaccttaggggcagatccgttttctcactgttggactctacctcactggtctggaagtcctccgaagacattatttttccaaaggaatttggtttcgtgcttgtgtaataaagccagaatttacttgttctttatctccccctttttctatttcactgtcacccctctttgtggacagaagttcgaacatgtggtgttgcactagtttgtgctcagggtattctgaagcccactcgtttcctaatttttactggattccaaagctttgatcgaggatattttttaagaggttcaagcttgtgactgttagtagtgcaaggatttgtatgggctcagtgattacaaacaaagacatgcaaaatacaactgtttaaacattttcaaggtatttttaaaggttttgtattgaaacaatgtttatatttactgagctcctaaaaatggtagaatacacatgaaaacttttgtttaggaaaagttaacttgttaaattcttttgaattgaataaaaaaatgcattgaaaccatatggtgtgtgattaaaaaaaatgaataaattgtgaagaactggttttggttacaggagtcactggaatccgactggagatgatttggccccctgtcctggtctaacatacaaatctaggaatattatgcgttaaagtattttaaaatacattatccttgtaatgtattttacaaggataatgtattttaaaatgggagttgcataggagagatggatgtgtgtaaacattatcactaaaatgataaacagaatacccattagaattcttagaactattaatgatcaagaggggtggaggcatttcttggtatcaaataactggttaaggttactttgggcgaaatctatttcctttttgtttttgttgttggataacaagaaatgtctagactaatattcatcagttttacaaacataatgaaaattagttgatttttagttgatttttttgtcccaacattttttttaacctttttgccactcattatatgtttgcagttctaggtctttgacagctgaagaccacaggaatcaaacaggcgagacacacagaatactgacccttctttacgcttttatagtgtttataccatatggcccagtgtggaattcttgattatccaagtgcctttggtcatttgtggcaggaaaacttaatagtttttagccagcagtgccacagccagcttttactgcaatacctaaagggtcaagtagtgtttttgtaccactattatttcaaatttaagtattctgccatgaaacgatccatactgggctggaacttgacatgtgaaatctttaatactaaagcttatctctgcttggcagctttttaggagaataatgagagttacaattttgactcttgcgttcctagaattcaaatggcatagctttctgaaatgagtatttcaagtttagtagtccgtataggagtgttgtgacttcaatttcagtgttcttgttaaaagaaataatatgatatatatatacacacatatatataacttgatgccagttttctagtaagcctcagtcttttattcactactcaatgataatgcattgtacaaacactgtcacatgagtaaataaaaatgaataattccttagaagatggagagtgttaaattatatttgtgataggaagcttagacatatcttttggttattagcttccattgccaattgtatttcagatgcatagggttttcttcccaaaaatatattgttaacttttatagctaactagcacctggaaaaaatgtatttgtacaactttactattgtatatagttttataataatgaaaaataaacccaatggccatattagaatgcaatttcgacatacagcttatctagatagttttccagaggattttgaaatttggcttaactgggaggataactgctcagcacaccactgaaacataaccactgacaccattcatttattttaactgagattcttgacatttttctctcctatgccttgttactttagcatacttgaactcacataaatgcttctttggattacatgggctatctgattccattttggatctgattgtccatcttgaattcaatatggtattcatctggactattcaaaaattatgccatttctagtctgtgaaataagatgtaaaaaatctttatttttgccctttggtaaaaacctatgtgacaacttttaaaatgtgaagcaacatctaatatagttgactggtatactaataggaaagtgaaagtatttcatgggtactttgtcacagaatgtgaaaagaaacttggcatagtggcctttataatgaggcatccacttactcctctgaagtgaagtctgtagcttagcttgtgtatagtttttgaaagaaatctcatgatcttcgttcattctcttgccttctcttttatctcatatggcacaagtagagggggaagccaggaggaaattcatcacctcgctatgcttttatttgatttttaattcctgagtgcctaaatgtggtgaccggcacctcacataactttttgagattcttgatgtcatttttatccttcctgtcaaccagcaatgtatttttatgttactaaaaccagtaacgtcataattgttgagggcaagcttcattgttgatagtgcaaagtgtcgctgttgtgatgtgtgtttattttattcaagtttgaatattgacaagtgtaacttaagctggtgactgacacctattgatctgctgtgtgcaaatgatagtactattttttagaaaactcttaagtaaattttaaaaatatttgaatacaaaatatctgagcaattttgaactcaaaagtttttcattgttttaaggattgccacaggactctttaatggtttttaatggacatacatgcctaatatttattggtgtgtttaaaatattttttgatagagtgttatgtcttaagcgcattagaaaacaattgtttgtaatggaatcaaagtgtttccctggacagtttgatgtgcttatggttgagatttataatctgcttgtactttgctttttaacttattaactgtaaataaattttagagaatacata

SEQ ID NO: 20 - RNA, 4426 nt, Homo sapiens
uuuaaagaaaggcagccggcgaaaagaggcaagagaggagaagaaagagaaaccaggggggcgaggcgccguccaaugacaaagcccaggggugggcgccggccgccaucuuguaccgggcagcaggauauucgcccgcguccuccgcccucggagggggaggggcggcggcggaggcgagaaaaguagcgagagacgccagcagcagccgccgccgcggagccaacgcggacugggacggcggcggcaguagugggacccggcgagcgugaguggcccggagcggccuucgaugcggcgcaguaugaagaggcggcggcgccggcgcccggucgccccggccacggccgcccggggcggcgacuuuagggcagaagacggggcuggguuggaggcgcgggaggagaaggugguguacucgcggucgcaacugucgcuggcugacagcaccaaggcgcugggcgacgccuucaagcucuucaugccccgcagcacggaguucaugagcucggacgcggagcucuggagcuuccucugcagccucaagcaccaguucuccccgcacauccugcgcagcaaggacgucuacggcuacuccuccugccgggcccugguacccgaccccccggggcccccuacagcccgcggccaggcgcgccggccgguuccgcgcgcagcggccaggaggaggcgccgcggagcccgggcggccgcugcccgcaggaggaagccccggccgccacccccaccgccgccgccccccgaggagagcugcccggccaagcccguggcccccgggcccugcuucgggggccgcaccuuggaggagaucuggagggcggccaccccgacgcugaccaccuuccccaccauccgcgucggcagcgacguguggggcgagcgcagccuggcggcagcgcggcgcagggcgcgccagguccugcgagugaaccuggaacccauggugaggcuccgccgcuucccggugccccgggcaugaggugcggccuccagggcgccuccugccggccccgaccuugggacaggccuuccgcccggaggaaugaacaagugucagucgaguguuuacagauccggccaggaccccggcccccaaugcacuuuacgcgcgaagaaguugccggaugguugucccugucccgggccgcggcgcggucgucuuggacgcuggggcaggugugcccucugcugccucccguacccggccugcggagggaggggacagcuggacccgcaggggaggucccuuucuuccugaccaccgauugagacgucuccaggaccuuaggggcagauccguuuucucacuguuggacucuaccucacuggucuggaaguccuccgaagacauuauuuuuccaaaggaauuugguuucgugcuuguguaauaaagccagaauuuacuuguucuuuaucucccccuuuuucuauuucacugucaccccucuuuguggacagaaguucgaacaugugguguugcacuaguuugugcucaggguauucugaagcccacucguuuccuaauuuuuacuggauuccaaagcuuugaucgaggauauuuuuuaagagguucaagcuugugacuguuaguagugcaaggauuuguaugggcucagugauuacaaacaaagacaugcaaaauacaacuguuuaaacauuuucaagguauuuuuaaagguuuuguauugaaacaauguuuauauuuacugagcuccuaaaaaugguagaauacacaugaaaacuuuuguuuaggaaaaguuaacuuguuaaauucuuuugaauugaauaaaaaaaugcauugaaaccauauggugugugauuaaaaaaaaugaauaaauugugaagaacugguuuugguuacaggagucacuggaauccgacuggagaugauuuggcccccuguccuggucuaacauacaaaucuaggaauauuaugcguuaaaguauuuuaaaauacauuauccuuguaauguauuuuacaaggauaauguauuuuaaaaugggaguugcauaggagagauggauguguguaaacauuaucacuaaaaugauaaacagaauacccauuagaauucuuagaacuauuaaugaucaagagggguggaggcauuucuugguaucaaauaacugguuaagguuacuuugggcgaaaucuauuuccuuuuuguuuuuguuguuggauaacaagaaaugucuagacuaauauucaucaguuuuacaaacauaaugaaaauuaguugauuuuuaguugauuuuuuugucccaacauuuuuuuuaaccuuuuugccacucauuauauguuugcaguucuaggucuuugacagcugaagaccacaggaaucaaacaggcgagacacacagaauacugacccuucuuuacgcuuuuauaguguuuauaccauauggcccaguguggaauucuugauuauccaagugccuuuggucauuuguggcaggaaaacuuaauaguuuuuagccagcagugccacagccagcuuuuacugcaauaccuaaagggucaaguaguguuuuuguaccacuauuauuucaaauuuaaguauucugccaugaaacgauccauacugggcuggaacuugacaugugaaaucuuuaauacuaaagcuuaucucugcuuggcagcuuuuuaggagaauaaugagaguuacaauuuugacucuugcguuccuagaauucaaauggcauagcuuucugaaaugaguauuucaaguuuaguaguccguauaggaguguugugacuucaauuucaguguucuuguuaaaagaaauaauaugauauauauauacacacauauauauaacuugaugccaguuuucuaguaagccucagucuuuuauucacuacucaaugauaaugcauuguacaaacacugucacaugaguaaauaaaaaugaauaauuccuuagaagauggagaguguuaaauuauauuugugauaggaagcuuagacauaucuuuugguuauuagcuuccauugccaauuguauuucagaugcauaggguuuucuucccaaaaauauauuguuaacuuuuauagcuaacuagcaccuggaaaaaauguauuuguacaacuuuacuauuguauauaguuuuauaauaaugaaaaauaaacccaauggccauauuagaaugcaauuucgacauacagcuuaucuagauaguuuuccagaggauuuugaaauuuggcuuaacugggaggauaacugcucagcacaccacugaaacauaaccacugacaccauucauuuauuuuaacugagauucuugacauuuuucucuccuaugccuuguuacuuuagcauacuugaacucacauaaaugcuucuuuggauuacaugggcuaucugauuccauuuuggaucugauuguccaucuugaauucaauaugguauucaucuggacuauucaaaaauuaugccauuucuagucugugaaauaagauguaaaaaaucuuuauuuuugcccuuugguaaaaaccuaugugacaacuuuuaaaaugugaagcaacaucuaauauaguugacugguauacuaauaggaaagugaaaguauuucauggguacuuugucacagaaugugaaaagaaacuuggcauaguggccuuuauaaugaggcauccacuuacuccucugaagugaagucuguagcuuagcuuguguauaguuuuugaaagaaaucucaugaucuucguucauucucuugccuucucuuuuaucucauauggcacaaguagagggggaagccaggaggaaauucaucaccucgcuaugcuuuuauuugauuuuuaauuccugagugccuaaauguggugaccggcaccucacauaacuuuuugagauucuugaugucauuuuuauccuuccugucaaccagcaauguauuuuuauguuacuaaaaccaguaacgucauaauuguugagggcaagcuucauuguugauagugcaaagugucgcuguugugauguguguuuauuuuauucaaguuugaauauugacaaguguaacuuaagcuggugacugacaccuauugaucugcugugugcaaaugauaguacuauuuuuuagaaaacucuuaaguaaauuuuaaaaauauuugaauacaaaauaucugagcaauuuugaacucaaaaguuuuucauuguuuuaaggauugccacaggacucuuuaaugguuuuuaauggacauacaugccuaauauuuauugguguguuuaaaauauuuuuugauagaguguuaugucuuaagcgcauuagaaaacaauuguuuguaauggaaucaaaguguuucccuggacaguuugaugugcuuaugguugagauuuauaaucugcuuguacuuugcuuuuuaacuuauuaacuguaaauaaauuuuagagaauacauaaa

SEQ ID NO: 21 - protein, 235 aa, Homo sapiens
MRRSMKRRRRRRPVAPATAARGGDFRAEDGAGLEAREEKVVYSRSQLSLADSTKALGDAFKLFMPRSTEFMSSDAELWSFLCSLKHQFSPHILRSKDVYGYSSCRALVPDPPGPPTARGQARRPVPRAAARRRRRGARAAAARRRKPRPPPPPPPPPEESCPAKPVAPGPCFGGRTLEEIWRAATPTLTTFPTIRVGSDVWGERSLAAARRRARQVLRVNLEPMVRLRRFPVPRA

SEQ ID NO: 22 - DNA, 481 bp, Homo sapiens
aggcgctgcctttcctcgttggctactttcagtaagttgtgaccagtatgtctggacgtggcaagcaaggcggtaaagctcgcgccaaggccaagacccgctcttctcgggctgggcttcagttccccgtgggccgagtgcaccgcctgctccgcaagggtaattatgccgagcgggttggagccggcgcgccagtgtacctggctgcggtgctggagtacctgaccgctgagatcctggagctggctggcaatgcggcccgcgacaacaagaagacccgtatcatcccgcgtcacctccaactggccatccgcaacgacgaggagctcaacaagctgctgggcaaagtcaccatcgcgcagggtggtgtcttgcccaatatccaggccgtgctgctgcctaagaagactgagagccaccataaggccaaataaggagcgaggttgtgaaaactggaaaacaaaggctcttttcagagcca

SEQ ID NO: 23 - RNA, 481 nt, Homo sapiens
aggcgcugccuuuccucguuggcuacuuucaguaaguugugaccaguaugucuggacguggcaagcaaggcgguaaagcucgcgccaaggccaagacccgcucuucucgggcugggcuucaguuccccgugggccgagugcaccgccugcuccgcaaggguaauuaugccgagcggguuggagccggcgcgccaguguaccuggcugcggugcuggaguaccugaccgcugagauccuggagcuggcuggcaaugcggcccgcgacaacaagaagacccguaucaucccgcgucaccuccaacuggccauccgcaacgacgaggagcucaacaagcugcugggcaaagucaccaucgcgcaggguggugucuugcccaauauccaggccgugcugcugccuaagaagacugagagccaccauaaggccaaauaaggagcgagguugugaaaacuggaaaacaaaggcucuuuucagagcca

SEQ ID NO: 24 - protein, 128 aa, Homo sapiens
MSGRGKQGGKARAKAKTRSSRAGLQFPVGRVHRLLRKGNYAERVGAGAPVYLAAVLEYLTAEILELAGNAARDNKKTRIIPRHLQLAIRNDEELNKLLGKVTIAQGGVLPNIQAVLLPKKTESHHKAK

SEQ ID NO: 25 - DNA, 5061 bp, Homo sapiens
tttcctctcagggggcagcaggaagtgaggagaaagggctgggatgggaggcgggagcggatgggagggaatggggtttatcaagtcctcggcgagctgcccaacgggcagcagctggcgcaagtagcctagctggagaggctcaccccaggaaggagggaggccaccgacctactgggccgacggactcccacacaggtgagcccagagcagacggctggtctgcacccccacagatgcgctcgcagttgcactccctccctctcctggcgcccgggagggttaggggctggtggtgcagacgcgggcccttttgggagttgagtctcgcacaagggagcggacctaggaagagccgaggtggtttcgcacggggctcgccagggtctaagcctgccccccaccgggagaggcctgtggagcgtagggggcgctggatacgggatggaggccctgggagacccctcttgctggctttctcggaggtccagccagaaactgctgcaaggaatggaggcctcctcggggttgagagggagccgggctcccaaaggacctcagagactgggcagaaaaggacgggatctcagggatgactgtcccgccctgatgcgagtcagggagaggggcggccaacctcctagacccctctgagcttccctgaccccaaccctgcggccacgccgcgacccagagccgggctgccaggataacgactgcctcggcccttcctgggccggctaagaagcggtgcttggccccttccctcagtctggcagggggcggggcctccctttagacggcggaccagagaagggggcccctgattcgtgggaggcggggcactactctccaggagaccagaggtcgcctcaggtcaaagtccctttttccacacaaaggggacccacggctggcgtctacgttagggggtgcagagccagatctggtgctgccccctgccaacctcggagtaccacagcacctcctgatggccgaacggggcaacgcctcctcctattcccccccccccccttcccgtccccctgccttgtccctcacactgtctctttaaagggctggcggcgccgcggagctgggaggactgaaccaccggcctcgggctgcaggggaaacatttcaggctgactggcgctcgtggctgagactcccatagaaagcccggctcagaggggcattagggtcctaaatgggcggccacgtccctctgcagaggacctggggctcttcgagcccgaaacgaggcaccggcaccgagaaaggtggaccacaccttcccgccccgtccgcaagtccaatcccgggcccacctccgcactggagtcttaaagggccagcgtgcctgggggcggagccagcagaggcgctgagccgggccgcgcctgggcgaacggccggagcgggctgggctgggcccgggatggcggtggccctggcgccggtcccggtggcgccccgcgcgaggtgagggcgggcggtgcaaacctggcggctctctccccttgggctggggtctgaatccccgggggtgctcgcggagaggcgtcccagaaaccccacccccacccgaccgggcgcaggccccacgtgtggggcgggggcggggtcccgcacaaagacccggcggagcgcgctctagccctgagcggccgggcgggggaggcgagcgcgcgcattcccggtggcggtggagggaagggccgggcggccggcgccgccgtgggaggtccgctgcccctttgtccctacggggcctcctccaagccgggagagtgtcagcgctcgagagaaagtccggagagcctcactcttctgccgggcgagtgttacacggatagaagcctcccggcagcgttccttccagtttcgtagcctcttgacgagctgttccctgctttacccaaatgctgtcgtttctctggatcaagggttcttcacggtgtacagggtgggcatcagctgttcagggttctctgaaaccatgtactggatggtatgcaggcatatatgtgactctggtgagcccaaattatctagttcttagaagggtcacagacctaatagagatttgtgccgagccacaggctacctgctccagaaaagagccctgtgcttctggcagtgagttcccagggtgccttgtctgccctgcagtggcctgtggtctctcaaacctattacagccatgagcacagtgcccccacacagcatgggctttgggagcatagatgggcttgaggtgggcacttccagtattccctagactgacttgttctccccaacccttcttccagttcctgagctggtgccaggcaggtgacacctcctgcagcccccagcatgcgggcaggcccaggccccaccgttacattggccctggtgctggcggtgtcatgggccatggagctcaagcccacagcaccacccatcttcactggccggccctttgtggtagcgtgggacgtgcccacacaggactgtggcccacgcctcaaggtgccactggacctgaatgcctttgatgtgcaggcctcacctaatgagggttttgtgaaccagaatattaccatcttctaccgcgaccgtctaggcctgtatccacgcttcgattctgccggaaggtctgtgcatggtggtgtgccacagaatgtcagcctttgggcacaccggaagatgctgcagaaacgtgtggagcactacattcggacacaggagtctgcggggctggcggtcatcgactgggaggactggcgacctgtgtgggtgcgcaactggcaggacaaagatgtgtatcgccggttatcacgccagctagtggccagtcgtcaccctgactggcctccagaccgcatagtcaaacaggcacaatatgagtttgagttcgcagcacagcagttcatgctggagacactgcgttatgtcaaggcagtgcggccccggcacctctggggcttctacctctttcctgactgctacaatcatgattatgtgcagaactgggagagctacacaggccgctgccctgatgttgaggtggcccgcaatgaccagctggcctggctgtgggctgagagcacggccctcttcccgtctgtctacctggacgagacacttgcttcctcccgccatggccgcaactttgtgagcttccgtgttcaggaggcccttcgtgtggctcgcacccaccatgccaaccatgcactcccagtctacgtcttcacacgacccacctacagccgcaggctcacggggcttagtgaggtatgtgtctccagggccctgccttttttctccttccttgaggatccactgcacatttgggttatcaggggccactataggactatacctgtagtttattggctgctccacatcccctcaaatcattctgtctataacctgaaagggtgacatcattatccccatttttcagatgagaacaattgaggcacagcgatgctgagaagtttgcccaaagcttcccagcaaatccagagcagagctgggactggggcccaggccttctaactttggaatccatcctgatagctgcacctaggctcaagtgtgcccttggcttgggaaactgagccccaaaagtggggtggaaatggacttaaatgtttaaaaaggaagcaaaacaaatgagcctctgcctggacgtgaaatgggggttgagctgggagttcagcaggttgaatcaggctggggtctgccctccttgtctgttcctgtcaccctgtggtctcagtcttccccagtgaccatcccttttcctgcatagatggacctcatctctaccattggcgagagtgcggccctgggcgcagctggtgtcatcctctggggtgacgcggggtacaccacaagcacggtaagcgagacccagcctgccagagctcagtctatgggacagacagagagttagggcctttggctaccaacctcaggtgggcaatcctagtctggtccccttgtctgtctcccacccgaggcatccctggtggcaacaggaggaggtcaccccggccctgctctcaggaaagaggaaatgctgtcctgaacagctgttgagttccgcccttccccatctgcccaactgggttccggtctgtacccccacccacttctcagcaggagcagggactgtgtggctcaggtgcagattgaatgtatgaatgtgtgcagttaaaataaggtatagtcatcacagtgtggacacagtttccatctgggcctgtgggctgaggcagctgaccctgacctgtggtccttgtcttctgcctccaggagacctgccagtacctcaaagattacctgacacggctgctggtcccctacgtggtcaatgtgtcctgggccacccaatattgcagccgggcccagtgccatggccatgggcgctgtgtgcgccgcaaccccagtgccagtaccttcctgcatctcagcaccaacagtttccgcctagtgcctggccatgcacctggtgaaccccagctgcgacctgtgggggagctcagttgggccgacattgaccacctgcagacacacttccgctgccagtgctacttgggctggagtggtgagcaatgccagtgggaccataggcaggcagctggaggtgccagcgaggcctgggctgggtcccacctcaccagtctgctggctctggcagccctggcctttacctggaccttgtaggggtctcctgcctagctgcctagcaagctggcctctaccacaagggctctcttaggcatgtaggaccctgcagggggtggacaaactggagtctggagtgggcagagcccccaggaagcccaggagggcatccataccagctcgcacccccctgttctaagggggaggggaagtccctgggaggccccttctctccctgccagaggggaaggagggtacagctgggctggggaggacctgaccctactcccttgccctagatagtttattattattattattttggggtctcttttgtaaattaaacataaaacaattgcttctctgcttggattttgt

SEQ ID NO: 26 - RNA, 2005 nt, Homo sapiens
uuuccucucagggggcagcaggaagugaggagaaagggcugggaugggaggcgggagcggaugggagggaaugggguuuaucaaguccucggcgagcugcccaacgggcagcagcuggcgcaaguagccuagcuggagaggcucaccccaggaaggagggaggccaccgaccuacugggccgacggacucccacacaguuccugagcuggugccaggcaggugacaccuccugcagcccccagcaugcgggcaggcccaggccccaccguuacauuggcccuggugcuggcggugucaugggccauggagcucaagcccacagcaccacccaucuucacuggccggcccuuugugguagcgugggacgugcccacacaggacuguggcccacgccucaaggugccacuggaccugaaugccuuugaugugcaggccucaccuaaugaggguuuugugaaccagaauauuaccaucuucuaccgcgaccgucuaggccuguauccacgcuucgauucugccggaaggucugugcaugguggugugccacagaaugucagccuuugggcacaccggaagaugcugcagaaacguguggagcacuacauucggacacaggagucugcggggcuggcggucaucgacugggaggacuggcgaccugugugggugcgcaacuggcaggacaaagauguguaucgccgguuaucacgccagcuaguggccagucgucacccugacuggccuccagaccgcauagucaaacaggcacaauaugaguuugaguucgcagcacagcaguucaugcuggagacacugcguuaugucaaggcagugcggccccggcaccucuggggcuucuaccucuuuccugacugcuacaaucaugauuaugugcagaacugggagagcuacacaggccgcugcccugauguugagguggcccgcaaugaccagcuggccuggcugugggcugagagcacggcccucuucccgucugucuaccuggacgagacacuugcuuccucccgccauggccgcaacuuugugagcuuccguguucaggaggcccuucguguggcucgcacccaccaugccaaccaugcacucccagucuacgucuucacacgacccaccuacagccgcaggcucacggggcuuagugagauggaccucaucucuaccauuggcgagagugcggcccugggcgcagcuggugucauccucuggggugacgcgggguacaccacaagcacggagaccugccaguaccucaaagauuaccugacacggcugcugguccccuacguggucaauguguccugggccacccaauauugcagccgggcccagugccauggccaugggcgcugugugcgccgcaaccccagugccaguaccuuccugcaucucagcaccaacaguuuccgccuagugccuggccaugcaccuggugaaccccagcugcgaccugugggggagcucaguugggccgacauugaccaccugcagacacacuuccgcugccagugcuacuugggcuggaguggugagcaaugccagugggaccauaggcaggcagcuggaggugccagcgaggccugggcugggucccaccucaccagucugcuggcucuggcagcccuggccuuuaccuggaccuuguaggggucuccugccuagcugccuagcaagcuggccucuaccacaagggcucucuuaggcauguaggacccugcaggggguggacaaacuggagucuggagugggcagagcccccaggaagcccaggagggcauccauaccagcucgcaccccccuguucuaagggggaggggaagucccugggaggccccuucucucccugccagaggggaaggaggguacagcugggcuggggaggaccugacccuacucccuugcccuagauaguuuauuauuauuauuauuuuggggucucuuuuguaaauuaaacauaaaacaauugcuucucugcuuggauuuugu

SEQ ID NO: 27 - protein, 473 aa, Homo sapiens
MRAGPGPTVTLALVLAVSWAMELKPTAPPIFTGRPFVVAWDVPTQDCGPRLKVPLDLNAFDVQASPNEGFVNQNITIFYRDRLGLYPRFDSAGRSVHGGVPQNVSLWAHRKMLQKRVEHYIRTQESAGLAVIDWEDWRPVWVRNWQDKDVYRRLSRQLVASRHPDWPPDRIVKQAQYEFEFAAQQFMLETLRYVKAVRPRHLWGFYLFPDCYNHDYVQNWESYTGRCPDVEVARNDQLAWLWAESTALFPSVYLDETLASSRHGRNFVSFRVQEALRVARTHHANHALPVYVFTRPTYSRRLTGLSEMDLISTIGESAALGAAGVILWGDAGYTTSTETCQYLKDYLTRLLVPYVVNVSWATQYCSRAQCHGHGRCVRRNPSASTFLHLSTNSFRLVPGHAPGEPQLRPVGELSWADIDHLQTHFRCQCYLGWSGEQCQWDHRQAAGGASEAWAGSHLTSLLALAALAFTWTL

SEQ ID NO: 28 - DNA, 30396 bp, Homo sapiens
agcgagagtgaggaggggggaggccacagcccgcggaggcaaggcgggtgcagggcttctggggacggagggaggtgccagaagttgagccctgaggccctgctggcccctgggcgcaggcccagctcaggcccccagggatggacgtcgtggaccctgacattttcaatagagacccccgggaccactatgacctgctacagcggctgggtggcggcacgtatggggaagtctttaaggtgaggaagcccctctgtccccaacaccctacaaccagtgacctttaaggcaagccctcggcagggaggaggctgcaagagggggtcccagttcttgaccttgactcagggatgctgtggagggactctggcaaatggagcctgcctgactgccaacttcccctttgcaaggctcgagacaaggtgtcaggggacctggtggcactgaagatggtgaagatggagcctggtgaggagggaacatggagctccttccccacatccccaccttcgcctcctgggacactgggatcacctcccctgtagctctctccccatgcgagctgccttttctctcccgccctcctcacagatgatgatgtctccacccttcagaaggaaatcctcatattgaaaacttgccggcacgccaacatcgtggcctaccatgggagttatctctggtgatgaacctcagacccaccctggcacccagcccagcccctaacccggagtccccatttcttgatgggggtaccctcagttctttttttttcttttctttttcttttttgagatggagtcttgttctgttgccaggctggagtgcagtggcatgatctcagctcactgcaacctctgcctcctgggttcaagcaattctctgcctcagactcccgagtagctgggattacaggcgctcaccaccctgcccggcaaatttttgtatttttagtagagatggggtttcaccatcttggccaggctggtcttgaactcctgaccttgtgatccactcgcctcggcctccgaaagtgctgggattacaggtgtgatccaccgcgcctggtcttggcaccctcagttctaaccttgaacttccatttctcaccataacccgacctcccatcctggacccccatttttgactgggctaaccctaccatgatcctcactcctaagtcccacttttctgaccagagcagcctctaatctaatctccaatctaaaattcccatttctgaccaagagtaccccaaattgatctcttcatagtaactgaatttgaaatcaactcccttgaaacgaagctctcaccattctgctctttggctcacccagtttcactctctgctcctttaatataaactcctaaattccctgatccccaaattaatattccagatgccccaataatgacctctgctccccagaacaggtgccctgggcccctctgtcccctccaaatctccacaacccgtgagatctctgccctgcctcctaggttggcgtgggacggcagtggggtcccgcccaaaggcctaggtttgagttgacttgccccggaactcacatttcctctctgagccttaacttccttgtctgtaaaatgggaatgaaacaacctcactctggtagacaaggagaggtggagtgatgagagctgttacgttaaagttcttattgaactagaacaagacagaagcaaaccaggggctttcctgcaaataataatgtatttactgctattattattcttactcttgaaccactgcaggttgcagaaactctggatctgcatggaattctgtggggctggttctctccaggacatctaccaaggttagagaaaggacaacgggacccaagcacccctccctatccccaccccccaaccccgacccaaattcacctcttccgtctctgtgtgtgtatctcacaggaactgtctttctgggccatatttcaaactcctgggctgagctgatcctcttgccttcagctgtcgaagtgctgaaactacgggcttgagccactgtgcctggctttttttttttttttttttaatataactgctgggcctggtgtggtggctcacgcctgtaatcccagcactttgggaagccgaggtgggcggatcacctgaggtcaggagttcaagaccagcttggccaacatggtgaaaccccgcctctactaaaaatacaaaaaattagccgggcgtggtggcagacgcctgtaatcccagctactcgggaggctgaggcaggagaatcgtttgattctgggaggcggaaaacctctgattccttccagccctagacctcaaatgttagaaaaggaaggacgtcattgagaagtcctcaggagggaaactgaggcccaaagagaggaagtgaatcccacagctggtctgtcagacctgatgtctgacggcctctctctgtctgtctgtctctctgtctctctgcctgtgtgttgttcttacctcgttaccctctgggtctctctctaaatctgtctgtctccccatattttggcctctgacctctgtctttgtcttctgtctcatttttttgtttttttcaatcctgttccttttgtatgtctcatgtatgatctgtctccgtttctctgtctctctctgtctctgtgcctttccttattttgcaaagtcacatgacgcccctgctcagagccctcctacagcttccatttctctcggaggagaagcccagactcctcatcagggtccaccccatgctggccaatctcacctcctcccactttcctcctccccctccactccaccccaccccctttgctgctttccagacccaccagggactatcccacctggggccctgcacttgctgtggctggtcccactcagagtgggagccctcatgtcttcacccactgtcaccttcagagagcagccctgactgaccacctctgtgaaatgtcatagctcctcctacgcgcacctttcttgctttatgtttcttcttgctgtctatcagcgtctgaggaactatatcatattctacttatttatcttgcttactttctttctttccttctttcctttttttttttttttttttttttttttgagacagagcctccttctattgcccaggctggagtgcagtggtacgatctcggctcattgcaacctccacctcctgggttcaaacgattctcctgcctcagcctcctgagtacttgggattacaggcatgcaccactatgcctggctaatttttgtattttttagtagagatggggtttcaccatgttggccaggctggtctcggactcctgacctcaagtgatccacccaccttggcctcccaaagtgctgggattataggcatgagccactgcgccaggcctattggcctcttttatttgcattgctgcctctttctgtcactgaccaccccaccatctccccctcccactggtcctatcctatttcccctctccctatggcaccctcttagctggtgtgggggggcaggactccccagcccaggttccctggctcccatccaatgcctggcctggccggggtgacctttgcagtgacaggctccctgtcagagctccagattagctatgtctgccgggaagtgctccaggtaaggagaggcctggggattctggggatgggaggggagggtggccccactccagcccccaaacactcactgtccccttgtccacccttctccccagggactggcctatttgcactcacagaagaagatacacagggacatcaaggtggtctgggggtgtaggggtgctgttggggggtggggcccaggagatgggagtggcatttcaggggctcagggatcagggtagtttgagctggcggagtgggctagcactgggctggggagagtctctgcagcctcccatatcccctctcattcccagggagctaacatcctcatcaatgatgctggggaggtcagattgggtgagtaaggctgggggttgagcaggggggctgactggggggccggaagcgcagtggaccccagatcactatgtctccctctgcttccagctgactttggcatctcggcccagattggggctacactggccagacgcctctctttcattgggacaccctactggtgagtggcgcccagcgggcagctaggggtggagtgggggtcagtggtttttcctaccctggttccccgggatcctctttcctggctccgttcccctgcctcgtcctttctccttggaagattctttcattctctctgggtgtcgcttgagttttccattttcctctctctttgtgcccttttctggccattgctctcggtgtttgtgttgatttttatcttgatttctctgtccctccatatccatttctgtctttttcctctagctcagtttgcagtgctctctgtctctttgtttctgtctctctcactctctgtctctgcctctctgtcttttcattttgttttgtttttagagacagggtctcactctgtggcccaggctggattgcagtggcatagtcacggctcactgcagcctagaactcctgggctcaggagatcctcccacctcagcctcccaagtagctgggaccacaggtgtgcaccatgacacctggctaatttttaaaatttgtgtagagatggtgttgtttttttttttttttctttttcgttctttttttttttcttgagacggagttttgctctgttgcccaggctggagtgcagtggcatggtctcagctcactgcaaccttcacctcccaggttcaagcaattctcctgcctcagccaccaagtagctgggattacagacgcctgccaccacgcccggctaatttttgtacttttagtagagacgggctttcaccatgttggtcaggctggtctcgaactcctcacctcaggtgatctgtccgccttgacctcccaaagtgctggaattacaggcaaaagccaccgtgcccagccgagatagggtcttgataagttgcccaggctggtctcaaactcctgggcctaagccattctccttgctcagcctcccaaagtgctgggattacaggcgtgagccatcgcgccccgtctgcatctctgtcttcatctgcctgtgtctgtctttactcctgtccctctgtctctccatctgactctctgtgtgctgcgtctcccctcaactccttctccttctctgcccctccttcccttcctgtccccatgccacctctggctctctgagcgtgtctgcccccaggatggctccggaagtggcagctgtggccctgaagggaggatacaatgagctgtgtgacatctggtccctgggcatcacggccatcgaactggccgagctacagccaccgctctttgatgtgcaccctctcaggtaggcaggcgtggggtccccaggcccagagatcctgtctagccctggcccaaagcccaccctcagcttccgccttccatcccaggaacctccaattcagggatcaccacttgagcctacctttgcacgtgctgcagctctattttttaaatttaatttaatattttattttattttattttttattttttaagacagagtcttgctctgttgcccaggctggagtgcagtggcacaatcttggctcactgcaacctccatctcctgggttcaagctattttcctgcctcagcctcccgagtagctgaggctgcaggtgtgcaccaccacgcccggctaatttttgtatttttagtagagacggggtttcaacatgttggccagggtagtctcgaactcctgacctcaggttatctgcccatcttggcttccggaggtgctgggattacaggcgtgaaccactgcacccagcctatttatttatttttatttttatttatttatttatttttgagatggagtcccactcttgttgcccaggctggagtgcagtggcaagatctcagctcactgcaacctctgcctccagggttcaagtgattctaccacctcaacctcccaagtgtgggattacaggtgcacgccaccatgcctggctaatttttgtatgttttggtagagacggggtttcactatgttgaccaggctggtcttgaactcctgacctcaagtgatccacttgccttggcctcccaaaatgctgggattaaaggtgtgagccaccacgcccagacattttttaaattaattaattaattcttattatttttagagacaggatctggctctgtcacccaggctggagtgcagcggcacgatcgtagttcacttcagccttgaatgccggggctcaaatgatcctcctgccttagcctctcacatagctggtcctacagacccatattgccacacccagctatttaaaaaaaaaattttttttttgtctcactatgttgccccagctggtctccaactcctgggctcaagctatcctcccgccttggcctcccaaagtgttgggattacgggcgtgaaccaccacacctggccttgccatagctctatcacttcataaatggcttcccttaggagaggcaccctggtgcactgtaaaacctgaacctcacttccatgctgtttctcactttgccctctgctgaccacaatgctactaggaacccctcaagccatgaggtctggcccccttgagggtctgaaccccatgtcctttccctactattctagagttctcttcctcatgaccaagagtggctaccagcctccccgactgaaggaaaaaggcaaatggtacgagagagtaacaggagggagggtgagagagggcagggctggggctgggtggcctgatgggagggtttctggtcccctcatccagaacctggcttcttcttcccaaggtcggctgccttccacaacttcatcaaagtcactctgactaagagtcccaagaaacgacccagcgccaccaagatgctcagtgtaaccctcccttccccaagatcctcagcctaggattccctggggccttccacaactcccgaggacatggataactttgttccatggagtccccgtggcctttccaaagtccctagtgcctcagaatttcccaggaccacccccgaccaccagagaccctccgggttataccccagacctttcccaaataccccgagttgccggaactgacaaattcccaaaggactcaagacttgtcctgagtgtcctcttgaatccccagggaaccacagtctcttccaagacaactctggaattctcctagccccgctctgagaaacctaaattcttctaattcctaaaaatgtcttagactcccaccggtcggctgggcatggtggctcacacctgtaatcccagcactttgggaggctgaggtagatggatcacttgaggtcaggagtttgagaccagcctggccaacatggtgaaaccccgtctctactaaaaatacaaaaattagctgagcatagtggcgcacgcctgtaatcccagctacttgggaggctgaggttggagaattgcttaaacccaggaggcggaggctatagtgagccaggatcgtgccactgcactccagtctgagtgacagggcgagaccctgtctcaaaaaaaaaaaaaaaaaaaaaaaaaaaaaaattagctgggcgtggtggcacgagcctgtaatcacagccactcgggaggctgaggcacgagaatcaattaagcccaggaggtggaggttgcagtgagcctggattgtgccactgcactccagcctgggtgacagagtgagactctgtcttaaaacaaacaaacaaaaaagaataccccaggcctctgagttccctggatttccccgccctctgccttcactggcaccttctccccagctagattcctttagtccagtccccaaggccctgtaccagtcctctctgtccacaccagccctctctgtccacaccatccctctggatacggacacctcttccctccgccagcatcaactggtatcccagcctgggctgaatcgaggcctgatcctggatcttcttgacaaactgaagaatcccgggaaaggaccctccattggggacattgaggatgaggagcccgaggtgagagccttggctgacaagagcactggggacctctcggtctttctcaggctgtgcctgctgccagcagtgccttcctgctgcctctcttagggggaaaacagggagggaggatggggagcttggtaaaaggctgtgtgcccagagggttacaggagagagcagatggaccccgggcagggtaggaggctgcttgggggtcttgagccctgacgtggctgcccctctgcccagctaccccctgctatccctcggcggatcagatccacccaccgctccagctctctggggatcccagatgcagactgctgtcgtgagtagagaatccttatgtttggggacacctgaccctataatagacctaagagaccaccttcccctaccatcaggcctccagagaccctcagcatcatctgatcctataagagaccccagacaatctcatcagcacctgaactacaaaatgaccgtagaggccaggcgtggtgactcatgcctgtaatcccagcactttgggaggccaaggtgggcagatcatctgaggtcaggatgtcaagacgagcctgggtaacatggtgaaaccctgtctctgctaaaaatacaaaaattagccgggtgtggtagtgcacgcctgtagtccaagctacttgggaggctgaggtaggaggattgcctgaacctgggaggtggaggttgcagtgaaccaagattgcgccactgcactccagtccaggtgacaagagcgagaccgtctcaaggacaaaacaaaacaaaacaaaaacaaaagcaaaatgaccatagagttcccagggagacctcagaaatctcatcagaacctcaatacccaaacggatcctgaaaacaccctgtaactacattgagcccccaacttcctgatcccaaaacttatttatttgtttatttttttgtgacaggatcttgctgtgtcacccaggctggagtgcagtggtgtgatcacagctcacttaagcctcaaacttcttgggctcaaggaatcctcccacctcagcctcctgagtagctgggactacaggcttattcaccacgcgtggctaatgttttttttttttttttttttttttttttttgagacggagtttcactctgtcgcccaggctggagtgcgatggtgcgatcttggctcaccaaaacctctgcctcctgggttcaagcgattctcctgcctcagcctccagagtaattgggattacaggcgcatactaccatgcccggctaatttttgtatttttttttagtagagacggggcttcaccatgttgaccaggctgatcatgaactcctgacctcaggtgatctgcctgcctcacctcccaaagtgctgggattacaggcgtgagccactgtgcccagtcacttggctaatttttaatcattttttgtagggatgggttcttgcccagttgtccaggcaggtctcaaactctgggttccagcgatctgcccacctcagccttccaaagtactgggattataggcgtgagccactgcacctggtcttgatcccaaacttgacccccaaatgaagtccctgtaatccaagacccctttccccaagggacagttccctgagatcatttgcagtccccaagatcctgactgcaacccccccgccaattctactctttctgttcttaaacccatctcgttaccccttgcccccagctcacagcaggttatcttcccccacccaccctagggcggcacatggagttcaggaagctccgaggaatggagaccagacccccagccaacaccgtgagatgctgtccccccactccccaccacaccgcctgcttccctgaggccactgctgacccttttcctaccccacaggctcgcctacagcctcctcgagacctcaggagcagcagccccaggtcagggaccccagggaggatggggagggggctggaatgtggacaaggcccccaaggctcatacctgtcacccttcaggaagcaactgtcagagtcgtctgacgatgactatgacgacgtggacatgtaagtgaggccctgcctgcagctccacaggccccacctcagcccccaccttcctacaatcccctgatgtggcctttcctccactcctgaccccgctgcacccctgcctttcttctagccccgagccctgagccctgattagaccctcaatgcagcccctctgcccagctacctaggccctgttccctaaccccacctcccttaacccttcacctccaacccctgacccccaacctgatcccagctccagctcccactttccttctttccttccaccttcttctttttttttttttttttttttgagatggagtctcactctgtggcccaggctggagtgcagtgacgtagtctcagctcactacaacctcggctccccgggttcaagcgattctcctgtctcagcctcctgagtagctgggattacaggcacctgccaccatgcccagctaattttttgtatttttagtagagatggggtttcaccatgttggccaggctggtttcaaactcctgacctcatgatccgcccatctcagcctcccaaagtgctgcgattacaggtgtgagccactgcacttggcctccttccatcttcttatacaatcttttgacttgaccctcagcgtcagccccccacctgctctccaccccagagctgaccccagttccttctagaatgtgctgctgctccaatctctgacttgaccccacctatcctccatgaccctgcaccctcagccacatcccagtctcaaactcctcccgaatgtcactctcaccccagacccaccctccagccttcagccccagccctcagcttttcctatctttttgcccgccctcaggctgaaccttggcacctggaaatctcccaaagaccagatactgagccccagatccagacccaacagtcagcccaggcccccatactccccagcccacaggccgagtcaggctccatccaggtgcgcgcactcacttcacccatcacgtgcgacagcctgtgtgtggcgccagcacagggagagcagggccacggcgctgatgtcacctgtgttactaggtggtgtaaaggtgcaaagccgtggtgcactgtcagcactccacctccaagagttgctgttactgttattagtcttttttttggaaacaggctaatcatttttttgtaggatggggtcttgccatgttgtccaggctggtctcaaactcatgatttgttttggcaccaaggctaagtgcaggagtgcaatgatggcttactgcagcctcaacctcccaggctcaagcaatcctcccacctcagcctcctgagtagctgcggtcacaggcgcacctgccacgcctggctaatttttaatttttttctggagacaaggtcttgctatgctgcccaggctagtctcgaattcctgggctcaagccatcctgccctggcctcccaaagcactgcgattacaggcatgagccactatgtccagcctggctattaatcctttaatcctctgctccaggcagaaccagtcatcccttaatcctcctcacctcagaccccagtcccgggcctccagcccagaaccatgccatcttccccgagtccttgttccccagccccccagctatttaacccatctttgtgtttcagccccacccctgcagaggacacacctcctccacttccccccaaggtaaggccctgggccagagctgggaggctggggcctcagggccactgggggccaggaggccaggtccttagatgctgggatactgggctctccagggcagggaattggggagaccaggatgatggctacattgggatctggaagtggcatccctcaacctcagggtcggattcaaaatatttagcctcttagacactggtcagtagctggtcctaggaagcccctgctatatatccagcattaacccattagtttctgaagtgtgttgatgtccaggctggggatgtcaggggaaggctggagggggcacaagatgttgtcgggggggtgggtcagagccacagctgttagttctggtggaggcagggacttgagttgcaaaagggtgccctctctgagatcatctgatgtatttccccacgctccattcccgtctccaaagcccaagttccgttctccatcagacgagggtcctgggagcatgggggatgatgggcagctgagcccgggggtgctggtccggtgtgccagtgggcccccaccaaacagcccccgtcctgggcctcccccatccaccagcagcccccacctcaccgcccattcaggtaatgggacaggctagggtggagggcgggagggttgggggttcttgggggctgattttctcctaacccctctcagaaccctcactctggaacccaccctcccgggagcttgacaagcccccacttctgccccccaagaaggaaaagatgaagagaaaggtgaggttcagctctgctgaggacttacacctctggacggggctggggatgcctggtggggtggggagggggtggcaggactgacagtaacaacaggtgacatttgttgagcgcttctctgtgccctacacttatctcctatcattacatggcataaagcttcacagagtgaagaagatatcacagagatgttatcccccatttcacaaatggggaaattgaagcacagagagggtaagtggcttacccaaggtcatataaatacctttgaggaggcaggctgaggcaggattgttgtttctgcttttttttttttttttttaaagacggagttttgcttgttgcccaggctagagtacagtggcgcgatcttagctcactacaacctccgcctccctagttcaagtgattctcctgcctcagcctccggagtagctgagattacaggcaatgcagcaccatgcccggctaattttgtatttttagtagaggtggggtttcaccatgttggttaggctcgtcttgaactcctgacctcaggtgatccacctgcctcggcctcccaaagtgctgggattacaggcatgagccaccgcgtctggcatgcttttttttttttgagacagagtctcactgtgtcacccaggctggagtgcagtggcgcgatctcggctcactgcaagctccgcctcccaggttcacaccattctcctgcctcagcctcccgagtagctgggactacaggtgcccgccaccaggcccggctaattttttgtatttttagtagagacggggtttcaccgtgttagccaggatggtctcgatctcctgaccttgtgatctgcccgcctcggcctcccaaagtgctgggattacagtcatgagccaccgcgcccagctactaaaaatttaaaaaattagctgggcgtggtggcacacacctatggtcccagctacttgggaagctgaggtgggaggattgcttgagtccagaagttagagtcttttgacaagatccatcaaaacctccatgagtcactaccacatatgcagttgcccaaagagccaagatctcaagaaattttacctctcataaatggagatgtacaaaaagaacatctctttattcaggaagtttcagtgtttttacgtacatgcataatgcctacacacgtagtcagtgttgtgataatgcacctttgtggcatcaaatttgccaacaaatgcataaaatgaattagaactctctaaagtctttttttttttttttttttttttttgagatagtatctcgctctgtcgcccaggctgctggagtgcagtggcgcgatcatggctcactgcagccttgacctcggagactcaagcaatccatgcacctcaccctccctagtagcgcttggctaattttttttttttttttctgagatggagtctcactctgtcgcccaggctggagtgcagtggtgctatcttggctcactgcaacctctgcctccccagtctaagtgatcctcctgcctcagcctcctaagtagccatgactacaggcgcccaccaccacgcccagctaatttttgtatttttagtagagacggagttttgccatgttggccaggctggtctcaaactcctgacctcaagttatctgccagcctcggcctcccaaagtgctggcattacaggcgtgagccaccgcgcccggcccagcttggctaatttttaaaaaaatgttttatagaggcagggtctcactatgttgcccaagctggtcctgaactcctgggcttaagtgatcctcccacctcggcctcccaaactggtgggattacagccgtgcctggttggctaccggctaaaagtatgtataatttatacctccagcactggaaatgattcaaagatgaaatgcatagcataattaatcatacatatatacatatacatatatacacacacatatacatgtatatgtgtgtatatatgtatacgtgtatatatatgtatatgcatatatatgtacatgtgtatatatgtatatgtgtgtatatatgtatatgtgtatatatgtatatgcgtatatatgtacatgtgtatatatgtatacatgtatgtgtgtgtgtatatgtatgtgtatatatgtatatgcgtatatatgtacatgtgtatatatatgtgtatatgtatatgtgtatatatgtatgtgtatatatgtatatgcgtatatatgtacatgtgtatatatgtatacatgtatatgtgtgtatatatgtatatgcgtatatatgtacatgtgtatatatgtacatgtgtatatatgtacatgtgtatatatgtatatgtgtatatgtatatgcgtatatatgtacatgtgtatatatgtatacatgtatatgtgtgtatatatgtatatgtatatatgtatatgcgtatatatgtgcatgtgtatatgtgtgtatatatgtatgtgtatatatgtatatgcgtatatgtgtacatgtgtgtatatatgtacatgtgtatataagtatatatgtacatgtgtatatatgtatatgtgtatatatgtatatgcgtatatatgtacatgtgtatatatgtatatatgtatgtgtgtatatatgtatatgtgtatatatgtatatgcgtatatatgtacatgtgtatatatgtatacatgtatatgtgtgtatatatgtatacatgtatatgtgtgtatatatgtatatgcgtatatatgtacatgtgtatatatgtatatatgtataggtgtgtatatatatgtatatgtgtatatatatgtatatgcgtatatatgtacatgtgtatatatatgtatatatgtatatgtgtgtatatatatgtatatgtgtatatatgtatatgcgtatatatgtacacgtgtatatatgtatatatgtatatgtgtgtatatatgtatatgtgtgtatatatgtatgtgtgtgtgtatatatatgtgtgtgtgtgtgtgtgtgtctatatatatatgtatatgtgtatatatatatatgctggccaggcacagtggctcatgcctgtaatcccagcactttgggagaccaaggcagacgcatcacctgaggtcaggagttcgagaccagcctggccaacatggcgaaaccctgtctctactaaaatacaaaaattagccaggcgtggtgttgtgtgccagtaatcccagctattcaggaggctgaggcagaagaattgcttgagcccaggaggtggaggttgcagtgagctgagattgcatcactgcactccagcctgggcaacagagtgagactccatctccaaaaacaaaactgacagctgggagtggtgcctcacgcctgtaatctcagcactttgggaggctgaggcaggtgaatcacatgaggccaagagttcaagaccagcctgggcaacatggcaaaactccatctctactaaaaatacaaaaattagctgggtgtggtggcacacgcctttggtcccagctactcagaaggcttaggcatgagaatcagttgaacttgggaagcagaggttgtagtgagctgagatcatgtcattgcattccagcctgggcaaccgagtgagactctgtcttaaaaaaaacaaatgctgatgatttaggatagtggaggaaaaactaaaaaaagaaatatataacaacaacaaaaaaaaacaaaaacaaactgaaaagaaaactcaatgtatgaaaaagtgtattacagggatagattatgggaaattgcaccaaggtaagaggcaggatttgaaccttggcactctcgctccaaagtcgtaaccactgccccttcctgttccctgctctctttgccggatctgctgcctggccccgcggcgacctgcccagggatgtgcccttctcgtaaagttgttcaatggctgccccctccggatccacagcacggccgcctggacacatccctccaccaagggtgggcattctggagggtcaaggagatcctgtagggaatgggagagcaaaagtaggggtggggagaagcctaaggaaggcacaaaggcagggacggggaggagcttaatggagttggggtgtggccaggctgaaacaggggcggagcttgtccttacactcaggatttggtgatcaaagatgcatagagggcagccaggtgtggtggctcacacctgtaatcccagcactttgggaggctgaggcgggtgaatcatttgaggtcaggagttcaagaccagcctggccaacatggtgaaaccccgtctctactaaaaatacaaaagaagctaggtaggccgggcatggtggctcacgcctgtaatcccagcactttgggaggcggaggcgggcggatcatttgaggtcaggagtttgagaccagcctggccaacgtggtaaaacctcgtctctactaaaaacacaaaaattagccaggcgtggtagcacgtgcctataatcccagctactcaggaggctgaggcaggataattgcttgaatccagggggcggaagttgcagtgagctgagatcatgccactgcactccagcctgggcaacagagcaagactcagtctcaaaaaaaaaaaaaaaaaaaaaaaatgggtagagggatgagttggagagtgaaagtaggaatattggaattcaggggccaggagtgtcagaatataacaaaaaggttagagtttggagcacgagaaagatggacagctggaggttaatgatagggagactgggagcagcattttggggtgaggaattttagagattaggatgcagccagaaagggacagaatctagagatcaaagagatgaagacaaggtcagtgttaaaggaacaggtcacactggacagaaaaagtcctgtttgggggtgtctgagtttgaaggtcaatgttaggattggcattagggtatcagaactggggagaaagaggggaggaaatcagaggactattttgggggacaggtctaaggttggggtcagtttggttcagaagacagttgggcagagaagaaagaaccaccagaatatgggtagtcaaaaggagggagagtgagactggcttgcgggaccgtccgctctggctttgtttggggaaacagaggctgggagtattggtttggagaaagaatagagggtcagagctggggacagagtgtcagtgtttgaggtcagacaggtggggatctgggaggtccctgaggatgaagtcggtcccagcgtccttgtctgtgcctccagaccagcacctgctcctgggggcagaggaaggcatcttcatcctgaaccggaatgaccaggaggccacgctggaaatggtgaggaaccataccgggccagggcaagggcaagggccggagtcgggggttgctggggtgtcaccagagccatctctcccattccctgcagctctttcctagccggactacgtgggtgtactccatcaacaacgttctcatgtctctctcaggtctggctgtgggtagcaggtgggatggggtcggaagttaaggggtccaagggttcgggggctgggaagtagacgggcacagctgaaaaaaaacttagactgcttggtcacaaagtcctaggttcaaatcccagacactttttgactgtgctccccaagcctcaatttctccatttgtaaaatggggttcacaatagtcctcacctctcaagtcaattttgaggtagtttctacaataaattagtctttttttttctttttttgagacagagtctccctctgtcactcaggctggagcgcagtggtacaatctcagctcacggcaacctctgcctcccaggttcaagtgattctcatgcctcagcctcctgagtagctggaattacaggtgtgcaccaccacacctggctaaattttgtatttttagtagagacagagttttaccctgttggccaggctggtctcaaactcctgacctcaggtgatccaactgccttggcctcccaaaatgctgggattacaggcatgagccaccacacctggccttagattagcctttttttttttttttttttttgagaccgagtctcactcagttgcccaggctggagtgcaggggcgtgatcttggctaactgcaacctctacttcctgggttcaagcaattctcgtgcctcagcctcccgagtagctggtattacagatgtgagccatcatgactggctttttttttttttactttttttattttttatttttagtagagatggggttttaccatgttggccaggctggtcgcaaactcctgacctcaggtgatccacccgccttggcctcccaaagtgctgggattacaggtgtgggccaccgcacctggcctaaattagtcctttttttttttttttttttttttgagatagactctcactctgttgcccagactggagtgcagtggcgcagtctcggctcactgcaacctccgtttcccaggttcaagcgattctcctgcctcaccctcccaagtagctgggattacaggcacctgccaccacacgcggctaattttttgtgtttttagtagagacggggtttcgccatgttggccaggctggtctcgaactcctgacctggtgatccactcgtctcagccccccaaagtgctgggattacaggtgtaagccaccgtgcccagccctaagttagtctttaaatagctttcatgttcagatgacaatcagaacttattccatactttactaagatagagtgagcaagttatagatttcaaaatctggacggggtgcagtggctcatgcctgtgatcccagcactttgagaggccaaggcagtagtactgcttgagcccaggagttctagatcagcctgggcaacatagtgagacctcgtctctactaaaaattaaaaaaaaattagctgggtgtggtggcacacacctatggttccagctactcgggaggctgaggtgggaggatcacttgagcccagaagttagaggctgcagtgagtcatgatcacaccactgcactccagcctggaagacagaatgagaccctgtctatatataacaataaataggccgggtgcggtggttcacacctgtaatcccaacactttgggaggccgaggcgggtagatcacctgaggtcagtagttcgagaccagactggccaacatggtaaaaccccgtctctactaaaaatacaaaaattatccaggcatggtggcgcatacctctactcccagctacttgggaggctgaggcatgagaattgcttgaacctgggaggcagaggctgcagtgagccaagattataccactgcactccagcctgggtgacagagcgagactgtctaaaataataataataataataaataaatgaaataatttctagttttgggggaaacaccaagccaaatgggattcatgagttagtgaaagccacatctgtgatgacaaactagaagattttctagatgtgtttcttctaaaactttgtaagatgtgtaacttcatctgactggttatgtgtccagagtttctgatacggctacaaataccacgagggtagggaacatattttttatgctcatcactgttcaccagagccaagcacagcaggcctggcctacaatggacgttcaatctatgtggagtgagaaatgaatgaatgaatgacaagtacttgagacttgcaggcttgggagtttcagacaaagggatggggctgagggaagggatggaggaaaggaagtggtatatgggatcctataacttcctgcttccccctacatacacacaccctgcaggaaagaccccccacctgtattctcatagcatccttggcctgctggaacggaaagagaccagagcaggaaaccccatcgctcacattagcccccaccgcctactggcaaggtaccagctcccaatgaatggcaccacacagccttataattcctcccatgcccctctgcctcctgctgtcctaccccccttcacacctacctattctccaggaagaacatggtttccaccaagatccaggacaccaaaggctgccgggcgtgctgtgtgggtgagagagagcttcacgggtgtgcagagagtgggcggggccaggccagaggaggggcttgaactgcatccacctgagaaggttacagagttaaggcaatgtgtccagaacccagaagatgggtggtagtgtgggtggcgaggaggatagagggcattgatcttgactcatccttgcccatgccacagcggagggtgcgagctctgggggcccgttcctgtgcggtgcattggagacgtccgttgtcctgcttcagtggtaccagcccatgaacaaattcctgcttgtccgggtaaggggcttgggagggtgctgggaactctgaggagtgggtggctaaggccttgcaccctttgcgcttctatcaagagctccatgaagccccacctccgtcgaggccccgccccaatctcccgaggccccgcccacctgcggtctgcgcttggagcctcgtccttctgaagccatcctgatccttaagcgccgcccctcacacctgggcctaattattcctcaggctcaatgctgccactccctgggtgtcctagtagagcccatttagagcctgtctctttgagtgtctaagcaggttttgctatctttggggccctgcccgtctgccgccaaggtggcatgcccccacatggaagccacacccactcggaggtcacgacccccgttcccgcggaggcaccaggccttatcccctgacatttctagacggcatcccccaagacttagggccctggttcggaagtcccaggccagctacaagccacgccccctgaggccccgtcctgaaccaccccctagcccgcccctccctgtgcggcccgcagcaggtgctgttcccactgccgacgcctctgtccgtgttcgcgctgctgaccgggccaggctctgagctgcccgctgtgtgcatcggcgtgagccccgggcggccggggaagtcggtgctcttccacacggtgcgctttggcgcgctctcttgctggctgggcgagatgagcaccggtgagtggggcggagtcttgctgagggcggggcttatcagatccggaggggcggagctggaggcggggcttcgcttagcctgaggcactacgggactgagaaagggctggaagggcggagaagggagaatggcaggttttagttaactggggagattgatgatggggtgggaccgggatggtgggcggggtttagcccacttgcttgtgaactgaggcggtggctaaagcacaggtactggccttctgggggtggtgtggggaaaggggaatggggtggggtcaatccttaacccactccccccaaacagagcacaggggacccgtgcaggtgacccaggtagaggaagatatggtgatggtgttgatggatggtgagaaccctccttcctccccttcctccccacccctccagctgcagtccctagatctctgcctccgaacttgtgcttctcagaaccccctgagcccctctgggccttgcccctgtcctacatagctttcacactgaatttatggattggtcccttagtaaccctctaagccttgctcacagttcttaaaaccgtctatctccttccaggctctgtgaagctggtgaccccggaggggtccccagtccggggacttcgcacacctgagatccccatgaccgaagcggtggaggccgtgggtctgtgcagggacgggagagcccaggatcaggggtggaaactcaagtgatccccaagggtaacgggcattgctttctccccagctatggttggaggtcagcttcaggccttctggaagcatggagtgcaggtgtgggctctaggctcggatcaggtaagcccctccatccaaactccacatcactgccccccagcctccatcatgacattcatcagatgggctccgagaactcctgagtcagagtgtgaagtcctggaggggaaacatcttccaaatttcagttcagatagatccccttctttgccccaggatttattttttattttatttttatttatttatttatttaagacggagtttcactcttgttgcccaggctggagtgcagtggtgcgatcccggctcactgcaacctccacctcccgggttcacgcgattctcctgcctcggcctcccaagtagctgggattacaggcatgcgccaccacagctggctaatttttgtattttcagtagagacggggtttcaccatgttcatcaggctggatggtcttgaactcttgacctggggtgattcacccgccttggcctcccaaagtgctgggattacagctgtcagccaccacacccggcctattttatagatagatagatagatagatagatagatagatagataaaatttatttatttttggagatggattcttgctctgtcacccaggctggagtgtagtggcgcgatctcggctcactgcagcctctgcctcccaggttcaaagaattctcctgcctcagcctcctgagtagctgagactacaggtgcatgccgccatgcttagctaatttttttgtatttttagtagagacagggtttcaccatgttgcccaggctagtctcaaactcctgagctcagccaatctgccttccttggcctcacaaagtgctaggattacaggtgtgagccaccactcctggccatttttatatattttttgagacagagtctcgctctgtcacccagggcagagtgcagtggcatgatccgagctcactgcaacctctgcctcctgggtccaagtgattctcctgcctcagcctcccgagtagctgggattacaggtacactccatcatgcccaggtaatttttgtatttttagtagagacggggttttgtcatgttggccagactggtctcgaactcctgacctcaagtgatctgcccgcctcagcctccgaaagtgctgggagtacaggcgtgagctacttcacccggcctgtttgttttggagatagggtctctctctcttgtccaggctgaagtgcagtggtgcaaccatagctagctgtagccttgactttctgggctcaagcaatcctccctcctcagcctctcaagtggcttggattacaggtgtgagccactgcacctggctgctcttggatttcttgagtcccaatctcatcctgggccactactgtgaccttgggctggcaacgttgcttctctttaagcttctgttccccaactgtaaaatggggaccactatagagatatatggatagttaagacaagactgtctgggttggaattcagctgagtggccttgggcaaatgacttaaccttcctgtgcctcactgtcctcatttggaaaatggtgtttatctcacagaatactgtgtcagactttgcccttacactttagtatttttatttatttatttttgctcactcagttccttccctctttttgaaatggagtctcgctctgttccccagactggagtgttagtggcacaatcttggctcattgcaacctctgccacccaggttcaagcgattctcgtgcctcaccctcacaagtagctgggactacaggcatgcgccaccacagctggctaatttttgtattttcagtagaaatacaaaaattatctcagctggagatctcggctccagtggcacgcccagtggcgcaatctcagctcaatgcaatttctgcctcccgggttcaagtgattcttctgcctcagatcctgagtagctgggactataggcgcgcaccaccatgcctagctaatttttgtatttttagtagagacgaggttttgccatgttggccaggctggtctcgaactcctgacctcaggtgatccacccacttcggcctcccaaagtgctgggattacaggcgtgagccaccgtgcccagctccttgctgtctttaagggagccatgttcgtagtgacagtggaggtatcttccaggcactgagacacacactttttttccctagctgctacaggagctgagagaccctaccctcactttccgtctgcttggctcccccaggtatgttgtggggtggggtgcagaaggacctgggagggggcttctgatgtgaagagagcattctgaggtgtccccagcaaggtatctctagcctggacagtgtctcacctggtcaccctgcttccatccctgctccctagagtctgttctctgcactgcagccacgggggcgttctctctttttgttttgtttctcactgtactcaaaggctggagtgcaatggcacgaccacggctcactgcagccttgacctcccaggctcaagtgatccacccacctcagcttcctgagtatctggaactaccggcatgtgccaccatgcccagcaattcttttatttatttatttatttatttatttattgagatggagttttgcttttgttgcccaggctggagtgcaatggtgtgatcttggttcactgcaacctctgcctcccaggttcaagcgattctcttgcctcagcctcccaagtagctgggattacaggcatgtgccaccacacccggctaatactatattttttagtagagatggcatttcaccatgttggccaggctggtctcgaactcctgacctcggtgatccacctgcctcggcctcccaaagtgctgggattataggcatgagccactgcacctggccaatccttttattttttaattttaattcttttatttataaaatttttttaaaatttatttttgacacagagtctcgctgtgttgcccaggctggagtgcagtggcacaatctcagctcactgcaacctctgcctcccaggttcaagtgattctcatgcttcagcctcccaagtagctgggtttacaggtgtgtaccaccacatttggctattttttgtatttttagtagagacggggtttcgccttgttagccaggctggtctcaaactactgacctcaggtgatccagctgccttggcctcccaaagttctgggattacaggagtgagccactgcacctggccttaattttatttcatttttgagacaaggtctcattctgttgcgcaggctgaagtgcagtgttacacacacagctcactgcagtcttgaccttctgagctcaactgatcctcccacctcagcctcccaagtagctaggtccacaggcatacaccaccacaactggctaatttttaaaatttttttgtagagacggggtcttgccatgttgccctggctgtccttgaactgctggcctcaagcaatcttcctaccttggcctcccaaaatgttaggattactggcatgagccaccacacctggctgcattttttttttttttttgagacggattcttgctctgttgcccagcctggaatgcggtggcgtgatttcagctcaccacaacctccacccactgggttcacgcgattctcctgcctcagcctcccgagtaactgggattacaggcatgtgccactgtgcccggctaatttttgtatttttagtagagacaggctttcgccatgttgtccaggctgctcttgaacccctgatctcaggtgatctgcccgcctcggcctcccaaagtgctgggactacaggcatgagccaccgtgcccagccctggctgcatttttattttagatttttatcttattaaaaatttttaactattaaaaataactattttaactattttgacataatttaaaactcacactcccagagaagttgcaaaaatcccttttatccagattaaccagatctttttttttttttttttttgagatggagtcttgctgtgtggcccaggctggagtgcagtggatctccactcactgcaacctctgcctcccgggttcaggcaagtctcctgtctcaacctcctgagtagctgggactacagttgcacaccaccacgcccagctaatttttttgtttttttagtagatgtgggctttcatcatggtggttaggctggtctcgaactcttgacctcaggtgatccacccacctctgcctcccaaagtgctgggattacaggcgtgagccactgtacctggccagatgttaatctttttaaccgcatttgccttattattcttttttttttcttttcttgagacagagtttcgctcttgttgcccaggctggagtgcaatggcataatctcagctcaccacaacctcccactcctgggttcaagcactcctcctgcctcagcctcccgagtagctgggattacaggcatgtgccaccatgcccggcctcttctctttcttatgcgcacacaccacacatacaagtatatgtgtgtgtgtgtgtgtgtgtgtgtgtgtgtgtgtgattttttaatgaatatttgggaatgaattgcagacgtgatgcccatttacccctaaaatacttcagtgtatgtttcctgaatcaaagcaaggacataatgttacaaaccacagcacagctgtcaaaatcaagaaaacaacactgaaacatcacaaccttctaattcatacccctactcaatttcaccagttggccaggtgtggtggctcacgcctgtcatcccagcactttgggaggctgaagtgggcagattacctgaggtcaggagttggagatgggcctggccaacatggagaaaccccacctctagtaaaaatacaaaaattagctgggtgtggtggcacgtgcctgtaatcccagctgggaggctgaggcaggagaatcacttgaatcggagaggtggaggttgcagtgagccgagattacgccactgcactccagcctgggtgacagagcgagactctgtctcagaaaacaacaacaacaacaacaaaaaatttcacccgttgtcctagtgacgcccgtgattatatatatatatatatatatatatatatatatatatatatattttttttttttttttttttttctggtccaagatcataggtggcacttaggagccatgtttctttataattaagccggaaaaaataattaaaacttcttttgtcttaaaggagctttgacctttttaaaaattaaaggaaatttgttttctaaaatgtcccttaactgtgtttgaggtttccacgttctgaattttgggcaggaatactgcagaaagatgtctttctcagtgcatcatttcaggaagtacacaatgctagtttgtcccattactggtgatattaacttcggtcatttggttaaggtagaatcagccagttctctccactgtgaagttgcttttttctccctttttctttttttttaaagatagattctctctctgtcaccctggctggagtgcagtgacgcgatcatggctcactgcagcctcgacctcctgggttcaatcagtcctcccacctcaacctcccgggtagctgggatgacaggcgcgtaccactacacctggcttattttcgtattttttgtacagacagggtttcgccatgttacttagcctggtctggaactcctggactcaagagattcacctgtgtaggcttcccaaagtgctgggcttataggcaggggtcaccgcacccagcctctgtttttctttgtaataagaagtatcccaccggtcgggcgcggtggctcacgcctgtaatcccagcactttgggaggccgaggcaggtggatcacctgaggtcgggagtttgagaccagcctgaccaatgtggagaaaccctgtctctactaaaaatacaaaattagccgggcatggtgttgcatgcctgtaatcccagctactcgggaggctgaggcaggagaagcgcttgaacccgggaggcggaggttgcagtgagccgagatcgcgccattgcactccagcctgggcaacaagagtgaactctgtctcaaaaaaaaaaaaagaagtatcttttggggagattcactgagacgaggtaaatagtctgtaaatacgttgtttctcatcagattttcacccactagttttattgttttttgtttgtcttttgttgttgttttgagtcagagtctcactctgtcccccaggctggagtgcagtggcacgatctcgcctcactgcaacctcctcctcccaggttcaagcaattctcctgcctcagcctcccgagtagctgggattacaggtttgagccaacgcacctggcctgcccactagttttagaatcaattgatttttccctgaatctattattgttaggtggctactaacaataaatggtgattttctgattctatgtttccttctgcgtgtgttagttggcattctactctaaagaagagctgtgtcttctccattcttctttctttataccagcatggtctcatggatttttattctgtgggttatagtctattactgtcattatttatttatttatttatgagatggagtctcgctctgtcacccaggctggagtgcagtggtgtgatctcagctcactgcaacctctgcctcccaggttcaatcgatcctcctgcctcagcctcccgaatagctgggattacaggcgtgcaccaccatgcctggataaatttttttttttttttttgagacagaggctcgctctgtcgcccaggctggagtgcactggcgctatctcggctcactgcaagctctggctcccaggttcacgccattctcctgcctcagcctcccgagtagctgggactatagtgcctgccaccacacctggctaatttttttttgtatttttagtagagatggggtttcaccgtgttagccaggatggacctggataatttttgtagttttagtagagatgggattcaccatattggccaggctggtcttgaactcctgacctcaagtgatctgccccccttggcctcccaaagtgctgggattacaagcatgagccaccatgcccggccttgtcattatttattttgaggcacaaatggtcttaaatttagccagtgggaaccactttaagtagcccctgtgtccttttgacatgccagaagggtcactttaaatccaaatctgatcgtgtcactgtctccctgcttaaaatcctcccatggcctcaagataaagactcaatcctggccacagcccacaaggccatgacatctccagccaagtcccagcctttctcccacctcaaatcctttgcacaggctgttctccccagccagaacactcttccttgccctttcaccaagttccctcctaaccccccttcaggctgcaccatccattctctggggagtctgggctgacctcctgggttaggtttccctgccagacatgccatgcttttttgcactcatgtaattcactgattcatgttgatctccttctctagaatgcaagcttcctaagggcagggaccgtgtctgcccattcactgctatagttcagcatggggctggcacagtctctattaactactttgtgaattaatgaatcaatgaacatatgaatgaataaatgaactgacttatctcttccttccacaggcctgtagtggtggagacacgcccagtggatgatcctactgctcccagcaacctctacatccaggaatgagtccctaggggggtgtcaggaactagtccttgcaccccctcccccatagacacactagtggtcatggcatgtcctcatctcccaataaacatgactttagcctctgct

SEQ ID NO: 29 - RNA, 2721 nt, Homo sapiens
agcgagagugaggaggggggaggccacagcccgcggaggcaaggcgggugcagggcuucuggggacggagggaggugccagaaguugagcccugaggcccugcuggccccugggcgcaggcccagcucaggcccccagggauggacgucguggacccugacauuuucaauagagacccccgggaccacuaugaccugcuacagcggcuggguggcggcacguauggggaagucuuuaaggcucgagacaaggugucaggggaccugguggcacugaagauggugaagauggagccugaugaugaugucuccacccuucagaaggaaauccucauauugaaaacuugccggcacgccaacaucguggccuaccaugggaguuaucucugguugcagaaacucuggaucugcauggaauucuguggggcugguucucuccaggacaucuaccaagugacaggcucccugucagagcuccagauuagcuaugucugccgggaagugcuccagggacuggccuauuugcacucacagaagaagauacacagggacaucaagggagcuaacauccucaucaaugaugcuggggaggucagauuggcugacuuuggcaucucggcccagauuggggcuacacuggccagacgccucucuuucauugggacacccuacuggauggcuccggaaguggcagcuguggcccugaagggaggauacaaugagcugugugacaucuggucccugggcaucacggccaucgaacuggccgagcuacagccaccgcucuuugaugugcacccucucagaguucucuuccucaugaccaagaguggcuaccagccuccccgacugaaggaaaaaggcaaauggucggcugccuuccacaacuucaucaaagucacucugacuaagagucccaagaaacgacccagcgccaccaagaugcucagucaucaacugguaucccagccugggcugaaucgaggccugauccuggaucuucuugacaaacugaagaaucccgggaaaggacccuccauuggggacauugaggaugaggagcccgagcuacccccugcuaucccucggcggaucagauccacccaccgcuccagcucucuggggaucccagaugcagacugcugucggcggcacauggaguucaggaagcuccgaggaauggagaccagacccccagccaacaccgcucgccuacagccuccucgagaccucaggagcagcagccccaggaagcaacugucagagucgucugacgaugacuaugacgacguggacauccccaccccugcagaggacacaccuccuccacuuccccccaagcccaaguuccguucuccaucagacgaggguccugggagcaugggggaugaugggcagcugagcccgggggugcugguccggugugccagugggcccccaccaaacagcccccguccugggccucccccauccaccagcagcccccaccucaccgcccauucagaacccucacucuggaacccacccucccgggagcuugacaagcccccacuucugccccccaagaaggaaaagaugaagagaaagggaugugcccuucucguaaaguuguucaauggcugcccccuccggauccacagcacggccgccuggacacaucccuccaccaaggaccagcaccugcuccugggggcagaggaaggcaucuucauccugaaccggaaugaccaggaggccacgcuggaaaugcucuuuccuagccggacuacguggguguacuccaucaacaacguucucaugucucucucaggaaagaccccccaccuguauucucauagcauccuuggccugcuggaacggaaagagaccagagcaggaaaccccaucgcucacauuagcccccaccgccuacuggcaaggaagaacaugguuuccaccaagauccaggacaccaaaggcugccgggcgugcuguguggcggagggugcgagcucugggggcccguuccugugcggugcauuggagacguccguuguccugcuucagugguaccagcccaugaacaaauuccugcuuguccggcaggugcuguucccacugccgacgccucuguccguguucgcgcugcugaccgggccaggcucugagcugcccgcugugugcaucggcgugagccccgggcggccggggaagucggugcucuuccacacggugcgcuuuggcgcgcucucuugcuggcugggcgagaugagcaccgagcacaggggacccgugcaggugacccagguagaggaagauauggugaugguguugauggauggcucugugaagcuggugaccccggagggguccccaguccggggacuucgcacaccugagauccccaugaccgaagcgguggaggccguggcuaugguuggaggucagcuucaggccuucuggaagcauggagugcaggugugggcucuaggcucggaucagcugcuacaggagcugagagacccuacccucacuuuccgucugcuuggcucccccaggccuguagugguggagacacgcccaguggaugauccuacugcucccagcaaccucuacauccaggaaugagucccuaggggggugucaggaacuaguccuugcacccccucccccauagacacacuaguggucauggcauguccucaucucccaauaaacaugacuuuagccucugcuaaaaaaa

SEQ ID NO: 30 - protein, 821 aa, Homo sapiens
MDVVDPDIFNRDPRDHYDLLQRLGGGTYGEVFKARDKVSGDLVALKMVKMEPDDDVSTLQKEILILKTCRHANIVAYHGSYLWLQKLWICMEFCGAGSLQDIYQVTGSLSELQISYVCREVLQGLAYLHSQKKIHRDIKGANILINDAGEVRLADFGISAQIGATLARRLSFIGTPYWMAPEVAAVALKGGYNELCDIWSLGITAIELAELQPPLFDVHPLRVLFLMTKSGYQPPRLKEKGKWSAAFHNFIKVTLTKSPKKRPSATKMLSHQLVSQPGLNRGLILDLLDKLKNPGKGPSIGDIEDEEPELPPAIPRRIRSTHRSSSLGIPDADCCRRHMEFRKLRGMETRPPANTARLQPPRDLRSSSPRKQLSESSDDDYDDVDIPTPAEDTPPPLPPKPKFRSPSDEGPGSMGDDGQLSPGVLVRCASGPPPNSPRPGPPPSTSSPHLTAHSEPSLWNPPSRELDKPPLLPPKKEKMKRKGCALLVKLFNGCPLRIHSTAAWTHPSTKDQHLLLGAEEGIFILNRNDQEATLEMLFPSRTTWVYSINNVLMSLSGKTPHLYSHSILGLLERKETRAGNPIAHISPHRLLARKNMVSTKIQDTKGCRACCVAEGASSGGPFLCGALETSVVLLQWYQPMNKFLLVRQVLFPLPTPLSVFALLTGPGSELPAVCIGVSPGRPGKSVLFHTVRFGALSCWLGEMSTEHRGPVQVTQVEEDMVMVLMDGSVKLVTPEGSPVRGLRTPEIPMTEAVEAVAMVGGQLQAFWKHGVQVWALGSDQLLQELRDPTLTFRLLGSPRPVVVETRPVDDPTAPSNLYIQE

SEQ ID NO: 31 - DNA, 45091 bp, Homo sapiens
ggggtcacagtgatagggccaccctggatgggaagacctggagggcagccacacagctggacggatgctgccacatctgggcatacagtgtctggacgctgccacatctgggcatacagtgtctggacactgccacatggagccactgtcatgcaggtcatatcagatctgagtgccccacagagtcacagtgtgtctggacagcctggacattggacattgctaagttgggtcactgccacatggagtcttgccatgcctgtgtgccccacagacctaatatatgtccggacagcttggatgctgccacgtaaggtcactgctgtggcgagtcttgctatgtctgggtgccccatagtcacagaacacctggacaccgccacatgcagtcatcatcatgttactttcaggagcctcaacacgagagctcaacactgcctccgaccagtccctctgaggcccacaggtctgtcatcccataggccaccacacagagaaatgctggctgagggtcacttgcttgctctgtgccccatgaggcagcacctgccccagatggacggggctgtgaggggtgtctccaggcacaaaggcccgaacacaggaagcctgtgaccatggcagccttgtcttatgggcgcatatgtgcgtgtgtggctgagtctctgacagctgtgagtgtgtgtgagcagggtaagggtacgtgaggggtctgagaggagtgggtgcttgtcccccaaacctgcatgaagcaagaacaactcctggccaggccctgtcctccccacgtacccctgcatccccagcctcgacccagggacatgcagggctcacaggagacagggctcaggctgccggagctccaaccaaactctgtcccacttcacgcacggactgtcctgggcaaaggtgttcacctttccgagcctcggtttccttatctgtaaagcaaagcgacaccagcaagcctgtgagcattgtgtatatagcagacatggaggtcctgcagcaggaggtgctcaataaacacaaagcgactgaaggatgggaccagcaagcctgtgagcattgtgtatgtagcagacatggaggtcctgcagcaggaggtgctcaataaacacaaagcgactgaaggatgggatgtgcgagaatcccagtggtgtgcacccaggccgcgacacatggtgggtgagtcatacctggcttctctgccttcctccctagctccccggttaactgacctggtcccttggtttggaaggactaggttttgcctgatttcacagcccaactccattgctgggccagagacagaactgactttccaggcagtgtggacgggcttgcccgcagagggggcaggcactctgggctgtgcagacaactctaggtggacatgaaggcagacgctgggtggcatgggcagctctggcgggagagggagactgtactggccacagcgtggccggctgactggagtgggggcactggcgctgccctcacagttgtaagcagccctgtgggggcgggcctacagtgggctggggaggcggggctgcaggagccgcaggagtcgcttctctctcttcagagtgctaggcggggttaccccactctggagctgcagggggcagtggccctggccagtttggttgcaggatggacagaggctcgttaggaggcagctccctgaccgacctggggccggggagcagcaggcggggtaggcacgggacagcgtggggagggtggagggttagggaaagacctggatgaagtcagggtggtgctggaggggtgcgagagtgttggggggtctctcctggtttaggggtgctctgagggccattcatctgtcagtggcccgaaggagggggaaaactgtcgccctgcaagggagagggggctgggccaagggggaactataaatagtgtcttcctccagcccagggggagggaccgccagctggcgctgcccaggccctcctgctctgctctttgctggcctccaagggatcatgtttgtccaggtttcctcttggggtcacaccagtttggggaagtctagaggctcatttaggatgggtttcacatgatgtggctttagcccttaaaccagcacttctagggtgtctgctgtgtgccctgtgccagtcctgagcttctctgaacacctgctgtgtactcagtttggtcatgaacctctctgaaccctttctgtgtgcccttgctggtcctgaatccctaagcacctactgtacgccctgtggcaggctggaaggaggaagtgcagatcagggttcccaggctgcttggtgacatggttctataacctgaagtcagaacttcacactccttgtgagccctgggcccagggagacacaggggacaatcctttgctggaaatggccagaggaagctggaattcctggaaactcctgaacctcccagtggacagcagggctgggggtggagagatatatgtgggaagggaggcagcagagagcagcaggccccactgcagcctgcctgtctctgcacatgctggggtgcaggacttgtgagtgtgtgtgcgtctgtgtgtgcatgtgcagctgtgccagtgtctctgtgtgcatcagtgtgtgggcctgtgtggcatgcactgaaacccctgggtctttatgctgcaaagggtggtttgtgggccagatgtggtggctaatggctataaacccagggctttgggaggttgaggcgggaggatcgcttgaggccaggagttcaaggctgcagtgagccatgattgcactatgtgctccaggctgggtaacaggagcgagactgtgtgtgtgtgtgtgtgtgtgtgtgtgtgtgtgtgtgtgtgtgtgtgtgtggtgggatggtttggcagttctgtcaggactggccagtagatacagggactgggaagagtttgagctttgagaactggccaccacatggcttctaggctgggacactgggaggaagtccagtggtcagtgcagagggcaccctgggagccaaccagggtcaggccagccaggttcatggtgggcagaggctgagcagaacatgttcacacgtgtgtacagacatcccagcatacttcccacgcctgggacagaacagctggctcactttcggatatactgaggaggaaaaagccatgagggccagagattctaccgggcatccgctgatgctgagagagcagacgctgggacagcatctccatggagaggacacaggggagtgggagcacacatgtgaaggtggactgtgcgattccactgtagtgtggcaggcaaggtctggaaggctgggagttgagctgagtccatgctgcactgtggactcgctttgtgatcttggacccttctccctcttcctgaccctcagtttcccacctgacaaacagggccatgggaggggagatggagaatatcctcagagcagatgtggacggtggccttggggaggaaccccaggcatctcctgatgttgacctgtggccttccagctggacatagggccttgaaggagggtgcctgggtcagccacgggtagactttctggggaagagaggaaggtgcagagctgttgcatttcctgggaaccaggctcatcctgtctgggtgtgaggatgccttcccagagatagccctggccccctgcccaggccagctgtcctctacccccagcccttgattagcatcccaggaggtctgggaagagaatggacaggccagaggaggtgctgggtgtctgtagatatcagaggagatagcttttgcaatgagtgctgcgggttagacagggtgtgggcatgtggtaatgaggtctcagaggccacggtggccccaagatggccttggcagtggccagaagacaagagggctggctgtgtcacgaacagaatgagtggctttggagaagtagggagcaggtcacgaggggcacccagctcatcaggagccgcccatggatgtgctcagatctgctgggactggggtggaggaataagcgggtagatactgcaaaaggaggatgaggaaggaggaagttgttgactctgcctggggcagggtgttcccagggcaagcagctagagctggtttgggggagggtccagatgggcttccagcatgtggacctttggaatcttcagttcctatgaagtgggcaagacatctgtgtcagtcatcttaagggtccttgccaagctttaaagagctgggtggacttggactgatccaaggcagggctgtggcagggagggcatgggagggggtgctacacctatagcccacgaggccagtcttgttgccagtcccatgccctcaacacctggctcctggctgggtacacactgggcagagagaacctgaggatgcagggcacctgccaggggtgttgtggatgacatcgctagagggcagtgtggctcaggttgaagccgtgttggtgggggctggggcagagagtgtacaaagcttggagaggcggggctggggatcccgaggaggcgggaaactgcaggagtccggtgggggccaaacaagaaagtgagccaggggtttaggaacttctggatctctcccttgttccttgtccccagtgcattttcaaagacaagagggagatacaaatatagtaaaaggcaaccataacgtattttaaaatgaatttcttagagattgacatacttaatttatactgtaatactgtaagatagacaatgtgcacatcccattttcctgaagagaaaatgttattaacatattattttcaaaaaatatgtaaaactttagttaaaaaaaccaaaatactaaaaatcaaaaaaaaattgtaaaaaatgaaattctggaaagacgattaagatactcccagggcttagtgagtacccaaagtacttggttactaagtgccacgcacggccgggcgcggtggctcacgcctgtaatcccagcactttggaaggctgaggagggcgtatcacctgaggtcaggagttcgagaccagcccggccaacgtggtgaaatcccgcctctactaaaaatacaaaaattagcagggcgtggtggtgggcgcctgtaatcccagctacttgggaacccgaggcaggagcatcccttgaacccgggaggcggaggttgcagtgagccaagatagcgccattgcactccagcctgggcaacaggagcgaaactccgtctcaaaaaaaaaaagtcccacgcatttgctcccagcagccaaagcaaagaaagaggaacaatattgaaatgtgttttgagtctctatccatgaggtaaaagagcttttccagcgtggttgagcatgctcctatggacggcggaagagtcccggggctcggagcagtcaagggggaccccgaggaggggcaggagggcgcagcggagttgacggctgggactgcaggcctactggcccctgtcggctctgaccaacctggccgtgcgggtcacgtaggcctcgtcccactgcatgaaaacccctccctcctgggggccctgggctccctagcaaggaggtagcagaattcacgcgtgccgctgctcagggatgcagcgccagggcggagcccgtaggtggggcctatgcaaatcagcgcgggcaggttgggagagctgagtttgcgcatccggggcgggcctgcacaatccgggccttgaactggggcgggaccagtacaatccggagttgagcatgcgcattctcgatcctggcctgaagaactgggcccacttgttccaaaacgggcgggtaggtgagttgggcatgcgtggtcggaggccgggcccctttcagctggggcggagcctactcactctggggcgggacctgcgggaagatagacatgggctgtcgcggcttgaggaggggcggggcccaaggggcgggacctcgggtggcccgaggtggcccggctgctgggttggaagcggcgcagtccgactcatcccggccccgggatggcgtccccacgggaattgacacagaaccccctgaagaagatctggatgccatacagcaatgggcggcccgctctgcacgcttgccagcgcggtggtgaggcggggtcctctgggaggaggtgggaggtgcaccgggatgggtgggtagggcggcctgggcgggggtctcgcatggagaaggggcgggagacagatggggaaccggggacaggtgaggttgccgtgactggggaggctgctggggacaggtgaggcggtcgtgacagtggtgggccagagacaggtgtggcagagcagggggcggggacaggtgtgtgggggcatatcggcttggcggtggctaggtctggccaccatcacctcggggagggctctggccccctcgcttccctctccaatccccatcgcccccagtctggggaggaccctgtgggcaccccaggcccttccctctctcctggccaaggagtgtgggccgggttgttggactggaactgagctgtgtggccctaggtgaattacttggcctctctgagcccagaactttcaaaggtgggctagttttccaacaggaggaagggtgcctcttggccttaaagctgagcttgggcaggaacttcagcagagatgtgctcaggatagagacagaaaagtatgccgtgtgggcctgtgtctgtgtcccgggacatgtaagtatccacctggggtcatgggtgtacagtaaaactggagagtgaaacagctaggagaatgctgaaattcatggaattgttaaggggctcacctctcctagggtcccaggtgtttaaaccgcttccttgagtttctgcctgtccttaaatgagctggcagttttttttttttttaagagatgagtctcgctcagtggcccaagctggagcaagtgcagtggcgcgatcatagttcactgcagccacgaccttctgggctcaagcaatcctcccacctcaacctcccgattagctgggattataggtgcgccaccacacccagcttttttttttcttttttctttttttttgtagagacagggtcttgctatgttgtctgggctggtctccaactcatggcttcaagtggatcctctggcctcggccttccgaagtgttgagattacaggcgtgggtcctggcctgcaacttttttattaccaggaaaagaaagatttgttttaggagtaactgaaacattgtaatgaatttgcagcttgtccagcacctcagagaacatctagtttaacagacagtgaaatggagatcaggagattgagtgacatgcctgggtctccctgtgatcctgcctctgcttatgtatgataagcaaggggagagttctttgtgctcatcctgctgcagcagcctggagccatggctttgatcatgatatgagtcctgggggaagggtgtgtgtatttctggccacactgtgagtcctggcaggggaaggccatgtttctgaccagaccaagtcgtggtaactcatggctttgattgtgatgtaggtcctggtggggctgtgctgtctataatgcacactcagtcctgagggctatggccacccctcctttgagactcttctggaggcggggaggctgagccagtctgtgttattagggctgtgtggtcctgacttaggggggtggctgctattactacataggggaaaggagtgaggacctggactttttttttttttttttttttgagacggagtttcactcttgttgcccaggttgtagtgcagtggtcctatctcagctcactgcaacctctacctcctgggttcaagcaattctcctgcctcagccttccaagttgctgggattacaggtatgcgccaccatggccggctaattttgtatttttagtaggatggagtttcaccatgttggccaggctcgtcttgaattcgttatctctaatgatctgccccccttggcctcccaaagtgttgggattacaggcatgagctgccatgcctagccaagtctgtgagcctttaaggagtaggtcctcaataagcggaggcagggtattctgtcatcactaccattctttctttgcttctcactacgtctgagtcagggattgatgcatcagctccaagccaacccccgttacaggtgagaggaagctgaggcccaatgggaaggtctcatagctcctgaggcagggcttgtgtttctccaggctctaagtgtggaactgaaatgtggctctggcctgagctgaggggctcgtgccatcacggtgtctcagggtgttggggtaggctgggttctaggtccgcactttttcctggaggaggaggtagcacctgagaggccaaagatgagacctgcaggttgtttggggatttgggcctcagggttcacagcagggagtgggtaagcagtgaatgaacatggaacccgcccatgcagcacctccagctcccagtgcctgcatttgggcaacactttaccctttgcatagtagacttgtaggttgagtgactgcaaggacagtctggacccggagggtgtgggtggggatggaagcggatttggtcccagggctttgtggggaggaagaagcaggacccactgctggtctgtgctttgtactgggttttctctggagtctagtccccagctcctcagggcactaggggctggtggactgagggatgtactgcacctcctccactcccacaggcacgcccccgcttgataaaatttaaagccacacctgagggcttgggaggcttttacctttcccatcattggcctccgagctcagacctggaggaactctgagggcaggtggggcaagagctgactcaagaaggactgcagaaaggacggtgtttgatggcttttctcagctgaaaggtggcaagactcttcctgggtaaggacatgactggtgtgtgcacagggcaacaggagagatgactttcagtcccctctgaaaagggcctccatggcacgttactttattttaaagagctcttccttccctagcctggcctaaggaggtgagagcagttgcagttcaggagtcaattctggcaccccctccagggacttgtggctgctccttgggtagaagtaatggaacatagacactgcccattgccaggcacgtctcaggccccttgggccccttcgctcctagagctcatggggcctgcagcgaatttacaggaaaggaacccatgagggaagttgggctgacatgtcttcacatttccttccgcacatgctcaatgttataaacagtgtgttcttttttttttttggagacagtcttgctttgtcccccaggctggagtgcagtggcacaatcttggctcactgcaacctctgcctcctgtgttaaagcaattctcctgtctcagcttcccgagtagctgggattacaggtgtgcaccaccacacccggctaatttttgtatttttagtagagacagggtttcaccatgttggccaagctggtctcgaactcctgacctcaggtgatctgcctgcctcggcctcccaaagtgctgggattacaggcatgtgccatcacgcccagctataaacagtgtattctaccatcctgtttgctcagtgtcagggtcctgtgggctcagagccacaggtgcagccgtgcacccagcccgcttagtccacgtgctctgttttgagagctgcaatgtgttccctccttgttgtgcctcagttggcaatttcttatggctggaatttcccagtgttttgctatggtaagcagagctgttgtgatacacttgaactttggttttcttttgggtcatttccttgggagcttatcttggggagcagaggagataggtaatttattgccttgttttgcacccaggcctgatttgctgccctgcctgcccaccttgtgctgcgcatgtgggtggaaggcgggaagggaaatgccaccaaatgccatgggaggaggctggagctgtctctgggaaaataggagatgtggagagggggtgcagatccccagtcctgaggttttgggagtccctgaaggagcagttggggggtggccccatcagcgggagcagggtagatgcaggatttcctcctgcttagcagctgtcgcactgcccttggttgcttgagagcccggccacctggccgggaactatgcaaacaatgcacaatgcgggcctcagctgtccaccggccctgaggaggcaaggccttgcctaacttgttttcctctcaccttagctaatactgagagttctctgcaagtttctccactctcactcagtcagcctgtttcatggggtctcctccttcccgcccctgaggctcaccatttgggtcacctttaaacaaggggaatgcacaggagtgatggagcccccactggcaagcaaggccctttgtttctctgcagggcctgcctggggccaggccaccgcctccatgccctgagtcccaagggcagtcggtgccgaggtacacctatggctttagctcagtatccgccagggtaggacagagggcacagcttcccagaagtgcccaggctcttggatagcactaggcttctctgagggatgactgccccattttacagctggggacaccgaggctcagagttcccaatgagtgtcagactcaagatggcaacccaggcctgactcctgatcccctgcggaagtgcttctggggcctctgtgctctgagggaaacaacttgttggtggggacagtctgtctaggcaaccaggtgaaggcacttgcagaaccaagaagaggggcagtgacaggtccccacatctgttcatctgcctgtctgctatggttttacctgacccaggtcctaaggatgaggaaaaggaagcttcctgaggcttctgacgtgagaccgcgtttgatggcactggaaactgagctgagggctgggctcacgcctgtaatcccagcactttgggaggacgaggcaggcagatcacctgaggtcaggaattcgagaccagcctgactaacataatgaaatcctgtctctactgaaaatacaaaaattagccaggtgtggtggcatgtgcttgtaatcccagctacttgagaggctgaggcacgagaattgcttgagcccgggaggcagaggttgcagtgagctgggtaccagtgtcctccagcactccagcctgggcaagggcgacagagcgagactccctctcaaaaaaaaaaaaaaaaaaaaaaaaaaaaaaaaagaaggctggaggtgatggctcacacctgtaatcccagcactttgggaggcccaggcagtcggatcacctgaggtcaggagttttgagaccagcctgaccaacatgccgaaaccccgtctctactgaaaatacaaaaattagccaggtgtggtggcaggtgtctgtaatcctagatacttgggaggctgaggcaggagaatcgcttgaacctgggaggcagaggttgcagtgagccaagatcgcaccactgccctccagcctgggcaacagagtgagactccgtctcaaaaaaaaaaaaaaaaaaagaaaagtgagctaggtcccataagatgaagctggcagttctgctgccttggtatctgttctagccagctgggaatatagggggctgtattcagatccttccgtgcctctagcctggcatcttctctggctggcacactgacctgtggcacatggatggtggtgggtgggctatcagagggactgtccttgtgggcatcagtctgggtctctggtctcaaccccttgtggtccttaccctgagagacttctagatgcctccctccctgatcctgcccacagttcctgagcaccagcgctgtgccaggccccagggccctaaagggctcagataccacagggcttcttctgctgtaagtgatcagtctagagagaagagtgtcattagtgaggtgaccaggattgagggtgaggggtgttcccggtggccatggagatgccttggggaaaggactcattgaggaagtgactttttagctgggctttgtatgatgaaaagaagttcaccacagggagggcatgcagtggggctatgtgttctgggagcactgagtgatggatggggtgggagagatgtaaaaaggttagggtatggattcctggatgacagaggcagggtgttgattaccctgctgggttttggtcctgtccttcatgcggtggggacccccctagccatgtttagccagtggcaagttcggttgactttatgcctggtggtgcacatcaggatgaaaagggctggagagatcccactgtgtctgccagagcccaggcgggcctggggaagggggacatgccaacggtggcttgaaaccagcatctggggccactccaggagctgtgtggggatgctaggaagccaagaagatacgtctgatgccagtcccatgccctgaggctgagagaccacaggctgagagggaggggtgcgctgggagggtcccagccctcatctgacactgtgctgcttgccttttagtgtgcatgaccaactgcccaactctcattgtcatggtgggcctgcccgccaggggcaagacctacatctccaagaagctgactcgatacctgaactggattggtgtgcccactcggggtgaggcttggccccagctgtctaaggggagctttgtggggcatgacgaagagaatagagaaggcctattctctattatttggcctggggttgggtcaaggtcagggttggtaggggttgctgttgctgtgaaagctgagcctctccttccctccagagttcaatgttggccagtatcgccgggacgtggtcaagacctacaaatcttttgaattttttctccccgacaatgaagagggcctgaaaatcaggaagtaagtatatgtgttgggtgtggggggagaggttgctgggggacccagtgtggagaaagctaacacattactgaccatttactgagaagcccctggagtggagctgctggtgaatgactgagctactcctgagccctggccttgcccagccctgatggctgtgtgacagggctgtgtgacaaggctggtctctggatctctcaggatgtggtgggggtgggaggtgatgggtttggggatgagaggagagggtgtgttgtgtggcctcctggtggctgggccattcctgccctggggttaaggaacccttgggaaggacagagcttcagggaggtaagaggggctcagcccatgcaggtcgttggagctgctgcctggaggtcacgctcgctcaccccagcgccccgtggggatggctgctgctggggaagggaacctgagtgagtgcaggcatacaggccttagggatggagctgggggtggggggcttcctcccttgccccaggataagctctctcctgtgtatttggagcatgttcttggtgtgtgattgctggtgcgattggctttgcattgacatctcctagatgctgctgggtgagtcgttcacacttctgctgttactctggagatagaaatatgtatatgctaccgccccaccctcaacaactttcagacttgaactgagtcctttcttcaaggaactgagcaccagctggtggtctgagcagccatgctgtgcttttctcaggaggtgttagctgtggtcttgagaagccccttatcaacctagggtggcagagacttgctcttggcccagccatcaggatagggcagtgagcagaggttgacccagctctagtgacttccccaaatcaagcccagtggctaccaggctgccactggggtccacactaggctacccgttccttctctggccaccagggggcaggaactccctgctgtggggcttggaccttcagactggagactgcctttgttcttgcatcggtgtggctgggccaggctgtggcaccaagaagggaaggggagcctgatattcaggtttctatggccaaattgtgggtaaaaatcaaggctggaccctctggttatattgagccagataaaaagtagaggactaatgtctgaacctaccgtgtgctgggttcttgatgcccattgtcaccccctacttttacagatgaggaaactgaggctcagacaggccaggagtctcgcacaaaatagcaagtttacatcagcgcccagacttgaatctaagcccatccaccgctaaaaagtgtccatcattccaatattcctcaataggtaggtcaaggaacatcaaatgcaaattttatttatttattttaaaaattattattatttgtgtgtgtgtgtgatggagtctcactctgtcgcccaggctggaatgtagtagtgcaatctcagctgactgcaacctccgcctcccaggttcaagcaattcttctgcctcagccaacaaccccaagctgtggacgctgatagcctactgtctgatcttcccagcagcttctgtggtgggcggtgcctcacttttccagatgctgggaccaaggccagaaagtgatgggggtgccttgggtcactcagggtttgaatttgaagtccgtcctgcctgaatccatagtgtttgtggggagagtctgccagctgttccactctggctgtccccctaaggtagggatatttgggattaattcaaatgaagagacctagactcagagaggttgggaagctagtccaaggtcaccctgcaacagaagctggggacaggctcattgctgcctttctgcaggcataccctctggctgccctagaaaccctctctgctgtatccgaatcctggctctggctgggccacagggccatctcctattaatcagcccaaaatttcccaattagcaaaataaaaggaccagagtttttaaaatggaaaacctgggaagagacagctgcatttcccagaggcccagttactcacacagtgttgaggtccatctctgacactggacacagcagaagatctagaaaagtgcgtgcaaggccgggtgcagtgattcacgcctgtaatcccagcactttgggaggccgaggtgggtggatcacttgaggccaggagtttgagaccagcctggccaacatggcaaaaccccatctctactaaaattacaaaaattagccacatgtggtggggcgcctgtcatcccagctacatcaggaggctgaggcatgagaattgcttgaatctgggaggtggaggttgcaatgagccaagattgcgtctctgtgctccagcctgggtgacagagtaagactctgtctcaaaaacaaagtgtatgcaagggcataagtacacatattctaaacaggcacactcatactcctgcacacagtcctataccacacacaagccccctatgcacacacacacgtgggcacatgcatgcatgtgcatacctcataggcacacatccggacatgcgtataccatatgcacagggtacatacacatgcacaccccctgtgtacacagtcacgttatacataagggtatatgtacatgtgtgggcacctacacatataaatacttgggctcacttaagccacacgtaattcaagggccattacacacacgaaggcgcacatgttctcaccctgtatatacacacacacctgagcacgctcatacatggtgtgtagggggtccccaagactgccctcaggttcagtgatttgctagggtgactcccaggacttggcatatagctggactcatggctaagacttagtacggcaaaatgacacaaagcaaaatcagaaaaaggggcctggggtgaagtccagaggaaaccaggagcgagcatcaagattttctcctcatggagtcacacaggacgcacttaattcctcctgcattgaacattgacaacatgtgtaaaatgttgtctgccagggaaattcatcagagactcaacgaccaaggtttttactgggggctggtcatataggcaccctgtgcctagcatgtaccaaaattccagactcccagaaggaaagcagataatcaacataaaccatgttgtttgtataaacagtctatgcacagtgagctcctcttataattcagggaaagtttcatatcactagagggaactgtttaccatcaagttccccaaccctggccaagggccaacctcacaagcaggcctttcgaaggggaccattctcatacctgctgtgttaactcttccacacacatgcagtcacccactacacatgaaggtgggtgcacacacatatgcatacctcagagtcatgtgtgtgggcacatatacgcttgtgttcacctgtatgcacatgtggatctgtgcacatgtacacaccaagcatgatcgcatatgttctcacacagtcacatggcacatgaagacatgtatacacacacaccatgtgtacacacatggtcacccccacatgcatactctgtatatgcttggacacacacacacaaacttatacacatgggtgcatgcacacacatcctgtgtgcacacatgtgggcacactcactcatacctgtgcccatttagtcacataccgcacacaggggttgtgcacgctcgtgtgtgtgcacctgtgctcatacatgggcccagggaatactcacacaggtacactcacagatttacatgtacacacttgggcacaacacacacataaccacccacacgtgtggattcatgcacatatgcatctcttcaccccatttgcactctcttatacacacacacacacacgcacacacacaggctcccaggctcttccctcagcatctccaccggggccctgaggtctctcctgcatggtggtgtcatggccagagcagcccacaaaagagatcttagcccagaacgtggggctctaaggagaaatgtccctaccaatgccagttacctggactctcagaattcagatgtttttggcatgaggaagaaagcactttgaggctttaactggaagacccattggggcacagaaatggttacaagggctggacatagtagctcacatgtgtaatcccaatattttgggaggctgtggcgggaggatcactggaagctaggagttaaagaccagcctggggaacatagtgagaccctgtctcttaaaaaaaaaaaacaaaagaaagaaaagaaatgtcacaaggagccgtaagagtagagctcttttcagtgccctggactcagctctaccactgatttctttgtggttctcagatcagcttctgccgctgtatttcaggcatatcgtcctgatgagagccctttgactttgacatgctgggagtttaaacacaaaatccaaagatcaacaaagccaggagggctgggcactgtggctcaagcttgcaatcccagcacttgggaggctgaggagggtggatcacctgaggtcaggagttcaagacccacatggccaacatggtgaaatcccatctctactaaaaatacaaaaaattagctgggtgtggtggcacatgcctgtaatcccagctactcgagaggctgaggcaggataattgcttgaacccagaaggtggaggttgtagtgagctgagatcatgccactgcactccagcctgggcaacaaagtgagactctgtctcaaaaaacaaaaaacacaaagctaggagatctagctttacccttacatagaaaaagggaagataatagataaaaaggtaatttatctatctccagacctcataggataaattgatgagaataatcctggctgggtgcagtggctcgcgcctgtaatcccagcactttgggaggccaaagtgggcagatcacttgaagtcaggagttcgagaccagcctggctaacatggcgaaaccccatctctactgaaaatacaaaaattagccagatgtggtggcacgtgcccataatccctggtacttgggtggctgaggcacaagaattgcttgaacctgggaggcagaggttacagtgagctgagattgcaccactgcactccagcctgggcaacagagagtaagactcttgtctaaaaaaaaaaacaaaccttctgtgtcaatccactttgcagcaataaatgaaaaagctgagaacttaaaaagattgtgtaagcctgggcaacatagcaagaccccatctctaaaagaaatttaaagattagccaggtgtggtggcatatccctgtagtttcagctactctggaggctgaggcaggaagattgcttgagcccaggagtttgggctgcagtgaggcatgatcccactgctgcactccagcctaggtggcagagcgagaccttatctcaaaaaaaaaaaaaaaaaaaaaaaagatctgaaaactgtatagtcagtgtttggtcataggtgggggattcccattctggagggtatggatatgatagaagaagagatgcagaaccctccctcagaaggggtggtttggggaactctctttcaggaaagaaagttgagcactaagcctaacactgcccgagggccagccctagtgttcctcccatccccaccaccaactcctgacatgcacacaagaaaacggctgcttttaaaaatgcttattttgaaatataaaaattagctgggcgtggtggtgcacgcctgtaatcccagctactcagtaggctgaggcacgaaaattgcttgaaactgggtagaagttgcagtgagccgagatcgcaccactgcactccagcctgggtgacagagcgagactcagtctcaaaaaaaataaataaataaataaaaggcgggcgggggggggcttattttgataatcagggaaaatatatgacaattagaaatcatgaatgtggcacaatgacagcatggatttgtgcacaatgagaggatgagggaaaatacagaaacgtagtgcttaaaaaatgttcctaatagccaagagtgtatagccttccacctcacaggagcagagttagccaaacactgaacattatcctaaggaaagagaagggaaactttgaaaagagagcaagagacctcggggctgttccttctcctgtcatgtctcctcctgttgtgtgtccctggccaccctcctggagccagggtcgggtgctgggctgaccctgtgttttctctcctgaaggcagtgtgccctggcagccctccgtgacgtccggcggttccttagtgaggaggggggacatgtggcggtgagtgtgacaccctggtgacagctgggagtgacacatgggagcccatccacatctgtgcctttgctcgtcaggcatctggaggggaaggcagggtgtgtgtgccccagctgctctgggtgccagcccttgggaggaagtctgcaacagctatgcaggaggaagccagagactggatatgggccaggagtttccctctgggcatgtggtggccgcatttgaccctgcaggacttccctctggatgcttgtattcttggccaccccagaagttacaggtatcaggttgcctaagtctttagtaaatgtgatttctcctggtgtggggagaatcctgcccagcattactggttgttgtaggaacccactgaatcctggattaaggggattccacctgtgtgttggcccttctagtcagacggaagagcagaacagggctaaactggggtgtctgtgggaaacggctctaccccagccttatatagtcaaacacaggggctgttctttcccttccttcttcttcctggagtcatgccttctggagttctctgtccccagctacaatctgtgcctgtagcacagccattgcccttctctctcctgggttgaatgttctgcctgtggatcccacatcatcctctctttgacttactgatttgtttcattgaagcacatcctccagtaacttcctgagaaaggtgcttggggaggtaaattgtgtgagaccttgcacatctgaaatgtctttttttaatcctcacatttgatggttgggtatagaatttctaggtggaaagtgcttttcccttagaacttctacaacatcactctgatgtcttatggcttctagtgtggctgtggagaagtctcatgtcattctgatttgctgatcttcctaaaagcttcatctcttagagggagctgagagtttctcatgccccttccgcttgggaggcctttagggtcttcaaggtgatgtggtttgtggtgggtcttctctccaccatacatggtcctagggggccccttttcatcataacactcttgttctccaggtcagggaaattgtcatgtattatttctttgacaaatcacctctgcccctttctggcaactcactccatccctactcccattttctgagctgctttttctagaacttctggtggctacatgctagcttgattctgagattctgattttatcttttttctcttaattttctttctttctttttttttttttttgagatggagtctcgctctgtcacccaggctggagtgcagtggcgtgatctcggctcactacaagctcctcctcctgggttcacgccactctcctgcctcagcgtcctgagtagctgggactacaagcccccgccactgtgcccggctaattttttgtatttttagtagagatggggtttcaccatggtctcgatctcctgacctcgtgatccgcctgcctctgcctcccacagtgctgggattacaggcgtgagccaccacgcccagcctttctctttattttctctgttttttttggttgtttgttttgagaaagacttcttcaacattatcttacaagtatatgagtgttgttgttttttatttccttgagacatggtcctgctctgttgcccaggctggagtgtagtgtctcaatcatagctcactgcagcctgtctcctaggcttaagtgatcctcacacctcagcctcctgagtagctgggactacaggcacgtgccaccatgcttggctaattcttgtatttttcacagagacagggtttcaccttgttgagcaggcttgtctcaagctcctggcctcaagcaatttgcctgccccagcctccgaaagtgttaggattacaggcataagccactgcacccggcccaaatttctttttttgtttgtttgtttgatttagtttctgtttttcttgttaaaggttttgctggagtgtccagtgagccctggctggatgccctttttaaaaaagtgatgctgggctgacatggtggctcatgcctgtaatcccagcactttgggagtctgaggcaggaggactgcttgagcccaagagtttgagaccagcttacatagcgagactctgtgtctacagaaaaatttttaaattagccaggtgtgggccaggtgcggtggctcacacctgtaatcccagcactttgggaggctgaggcgggtggatcacgaggtcaggagatcaagaccatcctggctaatatagtgaaactccatctctactaaaaaaatacaaaaaattagctgggcgttgtggcaggcgcttgtagtcccagctactcgggaggctgaggcaggggaatggcctgaacccaggaggcagatgggagactgaggcaggagaatggcgtgaacctgggagacagagcttgcagcgagctgagatcgcgccactgcactccagcctgggtgacagagcaagactccgtctcaaaaaaaaaaaaaaaattagccagatgtggttgggcacagtggctcacccctgtaatcccagcactttgggaggccaaggctggcagatcatgaggtcaggagttcgagaccagcctgcccaacatggtgaaacctcgtctctactaaaaatacaaaaattagccaggcgtggtggcacaagtagctgtaatcccagctactcaggaggctgaggcaggagaatcgcttgaacccagtaggcggaggttgcagtgagccgagatcacgccactgcactgcagcctgggcgacagagcaagactctgtctcaaaaaaaaaaaaaaaattagccaggtatggtggtacatgcctgtaatcccagctacttgggaggctgaggcgaaagaataacttaagcccaggaggttgaggctgcagtgagctatgattgctccactacgctccagcctgggcgacagagtgagaccctgtctcaaaaaaattttttttaaataaaaacaaaaaaatgatgctgtaaccgaggtgtggtgcacacttgtagtcccagctactcaggaggctactcagaggatgcttgtgcaggccccaggtacttctcaaagagctccagatgggtcagtgcctggctggatggggttgggaagggggcctgggcctccagctcttctttatcagccagctagtcctcccatttcgtccccacctttgtcccttttcttagcaatgccactgcaccctctggagtgctctggtcctgcacaggtggtgtgctctggttggccagcacctgtgtttggtttcctacatgactctgagtccgtcaccgtggatctctctgacagaattgtgttgatgtctccatctcctgttgtctcctttttctcctgtcatctctttttctctttatccttctgttcccattttactggggtgtcaggatggagtagaaataaacataggttcagtttactaggtttaactggtttcactgcaattcctgttggtcaaacacaaactgagtgcccactgtgtgcagagcagcactgagtaggttcttctgtgccacgggtctgctcccctgctgggagcacaggcatcctctccttctaacttccttggggcattctctccaaggaaggggagggccagcccagccgttgcaagtctggaggagactggccaggcaggtggacctggcagcagctggtccttatgagaaatccagtccccagagagcctgtgctgcggccctcactgcccacttcagggcccactctggccccttccttccccagggccagaggctgagttaaccctagtttggtcctaggtttttgatgccacaaacaccacccgagaacggagagcgaccatctttaattttggagaacagaatggctacaaggtgaggcctccttggctcctctccttggcggaactgtggcatgtcccctgccctccagggctcctttcaccgcctgcttatgcatgaggggcatggggctggcatggctcctgagtgtaatttgggatgagaggggctgtctccacttggggtttgctttccagagggaagggggttttcgtgggagagtctaggagagggcagcacctgctttagctctggactccttgaccccgcctccagccctctgaagcagggtttcagggcctggctgcttgtcagcatgggcctcaggggatggagagctccgaggagcaaggcgggaggccctgaacatgtccgtgttcctccctcccaccaccccggcgcttctggtcctgccgcagaccttttttgtcgagtccatctgtgtggatcctgaggtcatagctgccaacatcgtggtgagtagtgcatctgaccttgtcagaaggtcgtgtgtgacagggacatcccttttcaggttttggctaaccttaatttgatcttgaaccttgtgggggtagggaggaagtgtaacttcaaatgctgggtcaggtatgcctcgccctctgtggatcactgtggaaggctgggtggctggtggacattcactcaccccacctccgcctcgtaaccacctggacactaggagagcaccttcagcaggggtggaagggtgggtgaggggcatgttttatatttcagagaaagaaagactcattctttccttcccctcccccagtttatctgaggaatgggcatctgggtctgggaaaatgagagttcagggtggggaacggcctccaggcctccccctgtaccacaaggatgagggacttcaatccctggaccctcagtgataccctcttggcactggtgtgagaactcagaccagggagctgctggaccagcccccacctcagcttccagcctcaggttcccgcactggtctccggtgcaacctcctccagccccctgcccagcagtctccttggtctctggccccgcctggctcctgaccctgatatgtcctttctctgtgcctggctccggcagcaagtgaaactgggcagccctgactatgtcaaccgcgacagtgatgaggctacggaggacttcatgaggcgcattgagtgctatgagaactcctacgagtcgctagatgaggacctggataggtgagtcagggcagcgccaggccctgcagctgtgatggtgggcggcaggggtcatacttggctgcctcctatggctccccatggtggtggctggaggaccaaaaagcagagatggtctgacctttcttgtttatttccttggggcagaaatgtttggtcagaggtgacttgcagaacaccggttacctcatccaaaactctgcgagtcaggattttatactattccatcatgaaatcaagccgaatttctatgcaaggggtcttaaagcaggggttggcaaatattttctgtcaaagatcagagagtaaatattttatttagaccttggaggatgtacagtctctgttgcaggcactcactctgctgtcacagtacaaatgaaacatagatgatatgtaaatcaatgggcatagctgtgttccagtaaaacttgataaaaacagcccacggctgagttcgactggctggccacagtttaccaaatcctgtcttacagaacacatggggcagtggctgggtaaataataatgtagcccttggtgaagtattacagtcatcattacaactcgtcattgtggagagacatgggaaaatataatattgcattcagtgaaaaggctggaatacaaacttgtgcttaggttctgtaattctataagattgtgtaatacgggccgggcagagtggcttatgcctgtaatcctagcactttgggaggctgaggcgggaggattgcatgagcctaggattttgagaccagcctgggcaacatggtgaaaccccgtctctacaaaaaatacaaaaattagcctggtgtggtggcgcatggctgtagtcccagctactcgggaggctgaggtgggagaatcacctaagcccagggaggtcaaggctgtagtgagttgcagttgcaccactgcattccagcctgggtgacagagtgagaccctgtctcaaaaaaaaaaaaaaaaaaaaaaaaaggatgcacatgaaccaagaaacacaagcaactctgagatgaatgcttttggggtgtgcatagagcagggtcctcagctgggttctagagccagcccaggccgggcctgagctgaatggcacctgccacctgggcctctctatggctttcatggtcccccagcacagcatttctcttcatggttctgtgatgtgatccatttgtctggagcggcttctgttggatttgtcagtaagcgttgctcttgcttttattggtggtgtcatcgtgacacccccaaaccaaggtcccaaggtccagacagtgagagctcaactgagaatatccagaggactctcagcctgaaccagagcccaccctgcacccccacacccagagactgatcaatgtgctgtccaagctgcagtgccacataggtccagagtagggaaagtggctgagctggacttatcggctgccaccaccagcaccatcctcctgtgcttcctgtctcatccaccagctgcccaggatggggtgtggcagctgctcagcacacttggatgaccaggactgggctctagtgggaggaggtcactggggaaggaaaggccaggtccttgtacagctgaccaggaagagtgagggcgtggagcgtttgccagctactcccaagtcaacaaccctcgggaaaactgtctcttggttcaacttacagacagtgtattgagagtgcggagataggccaacaggggccccagggacacatgagcagcggagaaagtcatgatgtggtatggcggaccccccactttggatgtcacctttgggaagcatgatgagtgacgagcacctcccatctcccgtctcccacagggtttgcctgtgcgtcacacgcactgtgttgctcccgcctcacccccatcactcgcacaccagctgacggtcctgagggttgtaatctctggtggttggaagtgcaaggcctcgcagctagattccgtggctagccagatgtgctctgtgagaaccctggccacgctcacaggcctctttctactttctctctggacagggacctgtcctatatcaagatcatggatgtgggccagagctacgtggtgaaccgtgtggctgaccacatccagagccgcatcgtatattacctcatgaacatccacgtgaccccccgctccatctacctctgccggcacggggagagcgagctcaacctcaagggccggattggcggggacccaggactgtcccctcggggcagggaggtcagtgcatgtgtccctgcgtgcgcacacgggcctgcatttgtaccctgcgtggctgggtatatgcatgtgtgagtgcgctggggctaggctcccattcttttaatgtgcagtcgaggtgaatgaccttcattcaacctagaatcttcccatcatgtagggaaggtcatcaagcaacaggcaaatgcctggatctctggtttccatgtgagctgtcactcactgagccccttttgtcagaggcatgccacccttagagcgacctgagtccatacagtgtagcagatagctgtgccacagtccaggggagacctcagtggtcacgtagcacagggcacctggttgtggggaggcagtggccctgatgagtctcagctgtaactgtgctgctgtgctcagggtctgggagggtgcacaggaacagcacttgtgttcttgtgtgtcagcatgtgtgtcatcgacaagttagttcatgctttttaccaaacctgtagtgagtgttcaaggcgagggtgatctcatggaccctgcggctatgggatgctttaagggcagcccaagacctgtgggtctgagtttgcttatgatgtatttcagtttgccaagagtctagcccagttcatcagtgaccaaaatatcaaggatctgaaggtctggacaagccagatgaagaggacaatccagacggctgaggcactgggtgtgccctatgaacagtggaaggtcctcaacgagatcgatgcggtagttaccgtccctccctccctgtctacctcccagataccgcagggctgctgcatcatattgtaacaacagtgaccattgctccccttgggcaaaggagaggagagagaaaggatacaggaacctaggggctgggagcagagaggaaaaggcagcctaacaggatgggaccttgggtgagccctagaccattctcaggagtgagcctgggagttgacacctcaacctcactctcctccctccctgtggcctcctgctagggttcctcatggtctagctcaacaagaaatcagcggccacgggagcttggtagctgcagtcagccatagccaacctcccagggatctggagacacaaatgaggtgaaccagcacggcctttgtctctttaaagatgctgttctcgccaggtgcggtggctcacccttgtaatcccagcactttgggaggctgaggcgggcggatcacctcaagtcaggagtttgagtccagcctggccaacatggtgaaaccccatctctactgaaaatacaaaaattagccaggcatggtggtgggtacctgtaatcccacgtactcgggaggctgaggcaggagaattgcttgaacccaggagacagaggttgcagtgggctgagattgtgccactgcactccagcctgggcaacagagtgatgttctgtctcaaaaaaaaaaaaatgctcttctgctgacttctgggttgcattgtttctaagagaagtctgttgtcattctcatctttgctcttctggatataatgttacctcctttttctctgactgcctttaatattttcttttcttcttttttttttttttttcaagacaagatcttactctgtcacccaagctggagtgctgtggtgcaatcatagctcactgtagcctcaacttcctgggctcaagccatcctcccatctcaacctcctgactagctgggactacaggcacttgccaccatgccaggctaatcttttctaatttttgtagagacggagtctcatgatgttgcctaggctggaatattttctctttattgctgatttttagcaatttgattatgatgtatctcagtatggttttctttatgtttatcatccttggggtttattgagattctcggatttctgggtttctaaatataaaatgtgaagaattgttggccatcatttcttcaaaggtattttctgccaccccttctcccatcctggactcccactctgtgtgtgttagactgtttggtatcatcccacaggtcactgaacttctggttttttaatttcttctgttcatttcttctctgtctttttttccttccgagctttaatttagatagtttctactgctatgtcttcaaattcacttatctttacttctgcatttttattaaacccatccagtgaacttttcatatcagatgtggtgttttgaagctccaggaatttcattttgttccttttttgaatcttccattatttcttcattatgcttggctctgcagtccaggaagtgcctctgggcagtaagctgctgcctcctcccctcagcttgcttcccttctctcaaggatcacagtcctgcctagtctcgtgtctaaaaacagttgtttgatttgtccctttatttatttatttttttgagacggaggtttgctcctgttgtccaggctggagtgcaatggcacgatctcggctcactgccaccttcgtctcccgggttcaagcgattcttgtgcctcagcctccagagtagctgggattataggcacccgccaccacaccaactaatttttgtatttttagtagagacagggtttcaccacgttggccaggctggtcttgaattcctgacctcaggcaatccacccacctcaacctcccaaagttctaggattacaggtgtcagccacagcgccctgccaatttgtccttttttaataatagttgtttttgttggggccagagcaaatctggtaccagttgctccatcatggcttggtctttattatgggtggttcccatttcaatatgaaaagctttttctgtggatatatactttgactaatttgaatattaccacccctgcttttgtttttccatttttttttactgtggtaaaatatgcataacataaaatttaccatcatagctgttttgaagtgtacgtttcaggagtatgaagtacatttacattgttatgcaactctcaccaccatgcatctccagaactcttttaatcttgtaaaacagaaactctgtacccactgaacaataactcaagccagatgtgctggctcacacctatagtcccaggtacttgggaggctgaggtgggaggattgcttgagcccatgagtttgaggctgtggtgtgctatgatttcattcacgattggcccttgcactccagcctggacaacatagtgagaccccatctctaaaaaaattttaaaaagaaaaacaataactctatttgctactcccagcccctggcaaccactttctgtctttatgactttgactactttatatacctcatataagtgaaatcatatagtatttgtctttttgtaactggttactttagttagcataatatcctcaaggttcatccatgttgtagcttgtgcaagagtttccttcctgtttattttttaagacagcatctcactctgtcacccaggctacagtgcaatgtggaaatcactgcagcctcaaactcctagactcaacgattctcttgcctccctagtagctgggactaacaagtgcacaccaccatgcctagataatttttttattttttgtagagaagggaggctcactatattgcccaggttggtctcaaactcctagcctcaagcgattctaccactttggcctctcaaagtgctaggattacaaatgtgaaccatcacacccagccttaagaattttcttcctttctaaggcagaataagattctattgtataccacatttcgtgtatccattcatctgccaatggacacttggacagcttccactttttagctattgtggataatgcagctgtgaacatggatacaaatgtctctttgagaccctgctctcaattcaattctttttggtatagacctagaagtggaattgccagatcctatggtaattctgtttttattatttatttatttatttatttattttgaaacggaatctcgctctgtcgcccaggctggagggcagtggcatgatctcagctcactgcaacctccacctccctggttcaagcaattcccctgcctcagcctcctgagtagctgggattacaggcccacaccacgatgcctagctaattttttttgtatttttagtagagacagggtttcaccatgttggccagactggtctcaaactcccaacctcaggcaatccacccgcctcggcctcccagagtgctgggattacaggcgtgagccaccgcacccggcctctgtttttatttttttgaggaactgctgtactgtttcccatagcagctgcatcattttacatttctaccagaagtacacacaggttccaatttctccacatccttgtcaacacttgttgttttcttttcttttctttttttaatagtagccatcctaatgggtgtggtattgcatcttggttttgatttgttattcctgctttctgtccatatattttttcttttttttaagtgacagggtcttgctctgttgtcctggctggagtgcaatggcaccatcatggctcactgcagccttgacctcccaggttcaagtaatcctcccatcttagcctcccgagtagctaggactacaggcacacatcaccatacccagctaaatttaaaaaaaaaatttttttttggccgggtgcggtggctcatgcctgtaatccaagcactttgggaggccaaggtgggcagatcacctgaggtcaggagttggagacctgggaggcggaggttgtggtgagctgagatcacgccactgcactccagcctgggtaacaagagcaaaactccctctcaaaattaaaaaaaaaaaaaaaaaatttctgcttcccgggttcaagtgattctcttgcctcagcctcccgagtagctgggattacaggaatgagccaccaagcccagctaattttgtatttttagtagagacggagtttctccatgttggtcaggctggtcttgaactcctgacctcaggtgatcccacctcggcctcccaaattgctggtattacagtcatgagccactgcccctgtcctaaatttaaaaaatttttagagatgtggtcttgctgtgttgcccagggtggtcttgaactcctgggttcgagtgatctccttccttggcctcccaaagtgctgggattacaggcatgaaccaccatgcccaacctgtccatatttttttattatattttttcccttttatttttaacatttttgtatcattttctttagaataaagagcataggccaggcgcagtggctcatgcctgcaatcccagcactttgggagactgaggtgggtggatcacttgacatcaggagtttgagaccagcctgtccaagatggtgaaaccctgtctgtactaaaaatgtaaaaagtagctgagcgtggtggcgcatgcctgtaatcccagctacgtgggaggctgaagcaggagaattgcttgaacccaggaggaggaggttgcagtgagccaagatatgtcactacactccagcctgggtgacagagcaagactctgtctcaaaaacaaaagaaaagaaaacaaaacaaaacaaaacaaaagcatatacttgctttgagttttagcctagcccaagagcttttttcatcaaggcatctgcaaccacttaggtttattattatcattactggtatgtttgatcttgttttcaataccttggaattttctctttattccaatttttctgtgtagatatgatcttttttgttatttgaaaggtaggcaatgtttttattccaatagtctttaccttaaagcttttcaaagacattctcaggctggatgcacataattgaaatatacttaacaaagctcatactgtcacaggaaaataatttttgaccttctgttgggaaagatgatgttgtattattgccattcatttcctttttgctctgttttttcgatgtaattgggcagagtacagcatcatggttttattttattttatttttatttatttatttattttttgagaccaaatctcactctgtttcccaggctggagtgtagtggtgcaatctcagctcactgtaacctctacctcccgggtttaagtgattctcgtgcctcagcctcccgagtagctgggactacagttgtgagacaccatgcctggctaatttttgtatttttagtagagacagggtttcaccatgttggccaggctggtcttgaactcttgacctcaggtgatccacccgccttggcctcccaaagtgctgggattacaggtatgagccactatgcctggcctattttattttatttttgaaacagggtctggctctgtcacccaggctggagcgcagtagcaccatctcagctcactgcaacctccgcctcctggactcaagccatcttcccacctcagcctcctgagtagctgggaccacaggtgtgcaacactacgcctggctaatttttgtattttctgtaaagatggggcttcaccatattgcccaggctggtttcaaactcctgaactcaagttgtggttttattttttatctattctttctcttcagaattgataatctctttcaaaaaagtaagcaatttttataactcattttgtagctcatttaacccattttgtgcttggtgggggttatccagccactgatttctttctcacacaaacagcagctacctgaggcaggttataggacagtgtcttccctccaaatatatagatttgatgctaacattcagttttgcagagaagcctgcagccaccccagtttttttcctttgaagttaatctgattattttccaagatgcttgtggatttccttcatctttcaagttttgaaactattacagtttttatgatccattaatcatctttccatgtttatcttctgataaacagccttgggcttgtcttctattccaacattatgactttttcttagtttaatccacaatttattgccttatagttcctttaaaaaaatgatagctttattgagatataattcatataccatagaattcacccatttaaaatatacagttcaggccatttgtggtggcgcacacctgtaatcccagctactcggggggctgaggcaggagaatcacttgaacccaggaggtggaggttgcagtgagctgagatcgtgccattacactccagccttggagacaaggcgagactcagtctctaaaaaaataaataaataaataaataaataaataagtatacagttcagtggtttttagtgtgttcagagttgtgcaaccatcaccacaatcagttttagaacatttcatcaccccagatagaaatcctgtgcccatcaacagtcacttcccatttccctctaacccttccttctgccttaagctaccactaatgttttcaaggtttattcgtgtagcatgtagcagtatttcattcctttacattgccaaataacatcctattatataaatataccacacattatgtatccattcatcagttgatgggcatttgagttgttgccacttttgggctatgtggataatgctgctgtgaacattcatgtccaaggtgttttctatgtttgtttgtttgagacagggtcttgctttgttgcccaggctgagtgcagtagcacgatcttagctcactgcagcctccatctcctgggctcaagcaatcctcccacctctgtctcccaagtagctgggactacaggaactcgccaccacacccagctaatttttgtatttgtttgtagagatggggtttcatcatgttgcccaggctggtctcaaactcctgggctcaagagatctacctgccttggcctcccaaagtgctgggattacagacatgagccaccgcatccggcataagtttttgtgcggacttatatttttatttctcctcactgtacgctaggagtagaattgctgggtcatatggtaattatacattcaaccttttcagaaactgccacactgtttcgccatctcacattccctcccgcagtgtgtgagggctctgatttctccacatacccgcctgcgcttgttaccatcagtcttggttgtagccgtccaacatgggaactcagtttagccacattctctgccactttataacatggattaccttttctctagggtccaggaaaaggtacctcatttccccttgtgggctcacagaggcacctttaatgttcatatttctatcaacgttcttttcatgatgatatatgtgctctttacgatggtggaagctggccgggcgtagtggctcatgactgtaatcccagcactttgggaggccgagatgggcagatcacatgaggccaggagttcgagaccagcctggtcaacatggcgaaaccccgtctctactaaaaatacaaaaaattagccagccatggtggcctgtgcctgtaatcccagctactcaggaggctgaggcaggagaattgtttaaacatgggaggcagaggttgcagtgagctgagattgcaccactgcactccagcctgggcaacagagtgagaccctgtctcaaaaaaaaaaaaaaaaaaaaagatgatggacgctttctctgtcatcctcttcacttccttctgtgccttcaccagaataatctttaatgtctaaatttctactaacagtctcttcaagacagtctaagctttttatcatgcaccacaaaattcttccagcctctacccactatcccatttcataaccacttccacatttttagttctttattacagcagccagcagcacttcacctcctggtaccaaaatatgtgttagtattcaagtgtggtggcgcacacctgtagtcccagctacttgggaggctgaggtgggaggatcacctgagcctgggaagtttgaggctgcagtgagccaagatcacaccactggactccagcctgtgtgacagagtaagactgtctcaaaaaaaaaaaaaaaaccactaaatgttaaaaaaaaaaaaagtattagtttactagggctgccgtaacaaagcactacaggtgagtggcttaaaacaacatgaattgattctctcacagttctggaggctagaagtctgaaatcaaggcgtcagcggggccatgctccctctgaaggtgctaataaagaacgcttcctcacctcttcctagtttccagttgttgctggtaatccttggtatttcttggctcatagcctcatcactccaatcccacctctgtccacggtcatcacatggctttcttccctatgtatgtctgtctgtgccttcacatgacattctttttttttttttttttgagatggagtctcgctctgtcacccaggctggagtgcagtggcatgatctcagctccctgcaatctctgcctcccgggttcaagagattcttctgcctcagcctcccaagtagctgggactacaggcgtgagccaccacgcctggctaatttttgtatttttttagtagagacggggtttcaccatattggccaggctggtctcaaactcctgacctcatgatccacctgcctcagcctcccaaagtgctgggattacaggcatgagccactgtgcccggcctacatggcgttcttaaaaggacaccaatgactggatttaggacccactctaatccaatatgtccccatctttttttttttttttttgagacagagtctcattctcttccccaggctggagtgcagtggcgtaatcttggctcactgcaatctccacctcttgggtacatgcgattctcctgcttcagcctcctgagtagctgggactacaggcgtgcgccaccacgcccaactaatttttgtatttttagtagagacggggattcatcatgttgaccatgctggccttgaactcctgatctcaggtgatccacctgcctcagcctcccaaagtgctgggattacaggctgtgagctgtgagccaccacgcccagccaacttttctttttttttcttttcttttgagagggagtctctctctgttgcccaggctggagtgcagtggcacaatctcagcccactgcaaccactgcctcctccaccatgttggccaggctggtcttgaactcctgacctcaagtgatccgcctgcctcagcctcccaaagtgctgggattacaggcgtgagccatcgcgcccagccagctttttttttttaatggcatttgtagaagatgatctatgctctgtgtgtgtgtgtgtatcccaaataacacaagtgaagttttccttcatagtttgcataacaacctacactcacaagtactatttccacagcacagaaaagaaaaaacacatagcatctctgtgtgtattggatgggtgatggataggtggacaagaccatcctggtagctttttacaagcaaggaaccaccaatgatcagtgttcctagaggtcctcccctccttagacaggtttctgttcccttcacccaggaaatgcccgtgaacttggtctcttctgcttgatgctgcctcaccccacatgtccccaaggctcatcttctgggcctgtaggaggtgtgatgactgtggtatctccctagggcgtctgtgaggaaatgacctacgaggaaattcaggataattatccactggagttcgccctgcgggaccaggacaagtaccggtaccggtaccctaaaggggaggtaggtgggatttggggcttagtcccagccacctactgcccgcctgggagtaccacctgtggctgagggcctgtggggctctgcaggggctgcgtgggtagcagaaggggcctggtctcagaggcctgccagcctgggtgtgtggttcatctccaccccttcccagctatgcagcccaggccttagtcccttcctcaggtgtggagtgggcagtgccatgtagggcaggccttcaacctggagacctttggctccctgctctccattcttgtctttccccttcccaggggtggagaattcggaagggcagggcctgaggtgggggatctgcggagttaggctttcctgggacccctgtagacagtgtgcggtcccctggcattcccaggccagctcctttcccagcgagttgtcagccctttccggggcgctcaaatggctggggagttggggagaccatggcaggcctgggactcgggtctcagctcactcgagtccctgtctcgggcctcatccttcctttggatgcttcctcttgtcacaggctgagcccatcctgtccttcctgtggctccaggcaccacccccagccctggcaccagacccagggagaccttccacacatgagttggctaccacaagccactgcacttgtcaccttctctgacacagttcagcccaggccccaggtcagaaactgagggtcacctttgactgaggcatctccttccacttccaggaggtggcctggggcaggggccaaataaaaatacaccccgtcaacacacatatgtacacatatatatacacatgtagaagcacctccacccagaagccaggctgacaggtctctacactgtaccatcctcaggatagtatagctcttgggaacattaattattccccacattatgttaggccaagttcagatttagaaccaacccagataacggtcaggagaaacaaagcagctggctgctcaaacatgagaatacagtgaggagaattggttgagaaattcatgttaccaaaagaaccggtctaggattttctcagaactaccaggaactggcacaaatcagcgtgtcatttttgcttcctaatcaaagcttggggcacgttcagttctgactgctggaggccatttttgaaggaccactcattgtgtgcagaaggatgaaactgatgaaaatctctaaacctgccaggttgagaggcccagcaggggcctaaaccgtacatcacggcaggcatagggggaagatactgggcaggtagactgaggatagttcctggggaccccagctgtttctgatgagtcacactccagaaagttccaggtctttgctctcttccccttcgctcttgtcagtgcactctgtttgctgtgggctggaagcaggcgaggtcttctccaccagtcacatgaattctatagctgaggattcagtgcagagccccatgggtgggcactgaggtggaccctgggatggagcctgaggcctagctctgcgctctcaatcctaccaggacctagccctgaggtgggaaaggtggcccctttcctcagctgcccacccccatggcctcagaaggctaggctggaggaggcccagccacagcttcccagaatggtgagtagctgcaggagtggaaggtggcccagtgtccaggatgtgtctgtccctcccccggagccaggcctgagggacccctctctgcttgcccttgcagtcctacgaggacctggtccagagactggagcctgtcatcatggagctggagaggcaagagaatgtgctggtcatctgccaccaggctgtgatgcgctgcctgctggcctacttcctcgacaaggcagcaggtgtgggctgtgccccgggggaggtgggaaggttgtgtgagaaggtaggcactgtcaccaggcatttctggtgtgctagccatccccctctgtgtctacagaacagctgccctacctcaagtgtccgctgcacacagtcctgaagctgactcctgtggcatatggtaaggaagcttcctgcacattgaccatgggtagccatgaccttggatctctgcacagttccatgattttctccgaattccttgaaaattgtgttaggagcccattcctccacctactaccccaccacctttcccaatttgctttttttctttgagacggagtctcgctttgtcacccaggctggagtgcaatggcgtgatctaggctcactacaacctccacctcccgggttcagatgattctcttgcctctgcctcccgagtagctaggattacaggcgcctgccaccatgcccagctaatttttgtatttttagtagagacagagtgtcaccatgttgtcaggctggtctcgaactcctgaccttaggtgatctacctgcctcggcctcccaaagtgctgggattacaggcgtgagctaccatcatgagctaccatctgcggccctaatttgcttttaaaaagtttgttctggggctgggtgcggtggctcatgcctgtaatcccagcactttgggaggccgaggtgggtggatcacgaggtcaagagatagagaccctcctggctaacatggtgaaaccccatctctactaaaaatacaaaaaaattagctgggcgtagtggcgggcacctgtagtcccagctacttgggaggctgaggcaggagaatggcatgaacccgggaggcggaacttgcagtgagccgagatcgcaccactgcactccagcctgggcgacagagcgagaccctgtctcaaaaaaaaaaaaaaagtttgttgtgaaaaagtttatgtggccacagaagacctccccagtgactttgcttaaccattgcctacctgcatgaggggcttttctactgatttttctgaacccccacaaggccccttggtcctcagggcctggactttattctgggtgcagggcagtgtgagtccccaccctgcctcttgctataccagcagagacttcaggcaacttcttcatctctcaggtcttagctcttcacctttaacacaggtgctcttgggggaatggctgtgaagcccagtggcagctgatgtcactccagtgtgtgacaatggcctcatcccccattgcactgtgcacctggcacacggttgactgggccttatatggtagagttggaatgtgggtggtttgggggccctgaagactttgagagtcagtaacctcaacttaggcctgctgttcccccgatccctctcggtcctggggttggggagcctggggcctctgtgtggccctgtctgggccgtcacatagatatgcgtgggtctgacagcgtgtctcatccttcctcccggggctccccagagctgcctaaagtggaagaactagagtgaggctgagatggctgctccattccacacgcccagacccccctccaagagaagtttctagcatctgcagctcagctgcctttcaggagtggggatggatttgcatcttccctttggcaggttgtaaagtggagtccatattcctgaacgtggctgctgtgaacacgcaccgggacaggcctcaggtagcaatggggtcactgctggggtagcggggtgttcctgatgtgggggtgtccagactgcacatcctccagggccaggcccagctgcggcacctgccagagggagcttgagtcttctgccaagactgttgtcccatcagcagggcggggccctggctctgggtggggcctgcatcaggccttcccaaggcacctgccctggggatggggaaatccctgactctgggccaccaggctcaggagtgcctgaacttgggtgtggttggagccccaggacttgaggagccacagggctcccaagcagcaacttggaggtctaagtcaagggggcccttgggctcagtgagaatgaggctggaggctaagaatgaggcttctggccttctgagggcaggtgggcactcttcccactccccatccctgcagccgaggcctcatgagcccctttcctaaccccagcacctttaaaaattaaaatgggatcatgtacttttggggaaagggccatgcagatactgaaggggcctcagcatggggtggagaccttggtccagaaaagcagtcaccacctgtgctccccaagtgccttgtggaaggtagaagctcctcagagtgtagctcagaaccactcttagtcccatgtggggtccctccacaatgttggctccctctcccactggggccaaggataggacctacacttctgggagccccggtcccagttcctggaggccactgcacggagaaggctcttgggcctcagtcatgcctcttgccatccatgatggggcctgcttgggctctgggtccctgctgaggatgcacgtcttgggctggaccaggacatctggccttggacctcacagcacaggtgtgtagatgtgtcctgtcccttcccaacaccactgcccccaagcaggaccagttaccctgcaggcctctcttcccattgctctgatagttcgtgcatgtcttggccaagttcagcccaggcccaatttggtacccacaagtcacaggggaacgtacctcccaacgggcatcctttgggccaaggaaggcccagatggcactgggcccccagcgctgacagagtgatggtaagagaggcccctgggttggcagggtgatggtaagagaggtccctgggcctggcagcccttgggagctgaccctaccagtccatcaccatagtgtggctggcggtcattctgcccactatgggtgggtgcttctgagaggcaaaccgctactaaccccaggttcctggatggctcccttctggcccatccattggggcaggctgtggtggaaaaggggcgcctcaggaagcctgcccagcagtaagaattatacctgcccctacaattccaggggccggtcctatgagcccaggctgtgggccatgggggccatgtctctctccctgaagatctgggcatgtcatgttgcatggggcagcagctcaggtcatcagtgacctgctcctgcaggtgatggttccggggcccacagctgggaggaggggccaccaggctctggggcacataagacagcctcagagagctaagggaagtttcagattccctattcctcaggcctgagactccctgagcccgacaggccaaggatgggactgagctctgcagtttggtggggtccttctatagctgagggcttcaggaggccctgtaccccagttctgaggggacagaccaggctgcagaccaggaaatgcccataggcttctggggcacctctgacacctgcgtgccaacactttaaactaggaaggaggcacccccaggagttgaaccccttccctgccccacagatgaggataaaatccccaagccaggggttcctcctcaattgactcagccctgagataggaggtgggagtggccttgctttgggtattgcctgacctggctgcagtggagcaggaaacgaggtggcatcctccaccgcacctttgttctattgtccatccacccgctatgtggcacgaagctcttggccatgtattcttagggaagcttgtggtctagagtcttgcggctgtggctgctacagtgagaatgtgaagcctgatgaaccacagtgatgaggacggcagacagcaggcatctcatctattcctgccatggagtgaacgctctgtgtttttattgtacagaacgtggacatctcaagacctccagaggaagcccttgtcacggtgcctgctcaccagtgaccatgttcatccactgtgaccactaggcaggcactgctctctgcagagggggtcattccaggccctccagtgtgtgtgatagtcaccatgccatgcagggatattcttgaagccacacatggctggcggaacccagagcccccaccccagcccacctggctctttgttgacagtcggcgacaaggttgtgcgtggctcctgacctgctgctaagagtcacttgaccagactgcatctgcatgggctgcgcggaggttgcccagccccagtttcttccggcgcagctcttaggtgttcactctcgccagctcagttggctttgtgaagtgtgaaaccctacaatgtgaaaggaaagtgcttgctgtgatgttcctactgtggcccagctgcccagcatggacctggtgactctccacagggcctctaccatcctctctgtggccacttcctgagccagaggccaggtcttcatggggccctgagcttctgctgcctctggtgagagggagagcccttcccatccttacccaccaggaactagagccccaaccacagcagatgcttcctgggcagccactggccaggccgttgtatccatgtcacccttagttgtgggcattcatgaaagcaatgcgcttgcttcagcacattgggatgcacagaaacgtgagggcaggggggcagttgtggtcgcccctccccagttgtgcatgtacccggctacttaggtatgcttaggggagctggtggccaggggtgccccttcaggcctgctctcacagtgaaaccacttcaagacagggcaggaagttaccttcctggtgcacacaccgaagtgctcgagggagaggctgccgccccctctccccttccctggctgtggacactggcagccaatggggaggcggcctctcccctgttgctgcccgtgtccacacaggaatgtacactggtggcagaaacatgcatttgccataaataattcagaaacacttgtatggtcctgtaaaacttctctggtgtttgttgacttctgcctgtgggtctgaggaagggagaaggcagaacccataggcagtccctgggcaagggaggattttcccggccgcagcacagccttccattcatgtgcacgtgagtctggtgaaaatggccttgtgaagtccagtgtctgtcatgcccctgagttcttttggtcccagagaggcagcctgggcagtctgtttacagctggcaaacagactggctggcaagttgtggggctgggtcagaaagtgtctggacttgtaatcgggtgccctgctgtccacaggtggactctggggaagccaggcccctggatcccaagtcctttgtgtccggagcctttcctggcctgtgcctggagggtagcacatctttccagcctcccagggctttgcagcctgcagatgccacctgtccctgagagaagttagcgtccctggccctggccggtggtctctcatccttgtgtgctgctctgctaagagatgtccaaggcggagccggggcaagatccttccagactcatctgtcagagccccaagccctttagacccagagcccaaggaccatgcctttgggacattaggactgcagcctttgcttctgtgtattttggagttttggtgacttttgtcacctggacacactcatttgttagccatagtgggttcccttggtcagcaacagtgcatgtacctctggatgtcatctgaggtgagaccaccgaggccttttctctctgtgtacagaggggagttaggagttgctggactggatgcattacgaggactggggacagggtagagggacatccagggatcagggcatgagtgggggcaaccccccggcctctgccctggcatggtctccgcatgggctgaggtgtagctgattggctgccacatttcggccatgctggctggcgtgcccatgttgcagatattttcccgagttccccagaatggatggtattgaatctcagccacatgcaacactgtgtccagcattctttgcaataaatactttttaaaaaataa

SEQ ID NO: 32 - RNA, 3503 nt, Homo sapiens
cucaucccggccccgggauggcguccccacgggaauugacacagaacccccugaagaagaucuggaugccauacagcaaugggcggcccgcucugcacgcuugccagcgcggugugugcaugaccaacugcccaacucucauugucauggugggccugcccgccaggggcaagaccuacaucuccaagaagcugacucgauaccugaacuggauuggugugcccacucgggaguucaauguuggccaguaucgccgggacguggucaagaccuacaaaucuuuugaauuuuuucuccccgacaaugaagagggccugaaaaucaggaagcagugugcccuggcagcccuccgugacguccggcgguuccuuagugaggaggggggacauguggcgguuuuugaugccacaaacaccacccgagaacggagagcgaccaucuuuaauuuuggagaacagaauggcuacaagaccuuuuuugucgaguccaucuguguggauccugaggucauagcugccaacaucgugcaagugaaacugggcagcccugacuaugucaaccgcgacagugaugaggcuacggaggacuucaugaggcgcauugagugcuaugagaacuccuacgagucgcuagaugaggaccuggauagggaccuguccuauaucaagaucauggaugugggccagagcuacguggugaaccguguggcugaccacauccagagccgcaucguauauuaccucaugaacauccacgugaccccccgcuccaucuaccucugccggcacggggagagcgagcucaaccucaagggccggauuggcggggacccaggacuguccccucggggcagggaguuugccaagagucuagcccaguucaucagugaccaaaauaucaaggaucugaaggucuggacaagccagaugaagaggacaauccagacggcugaggcacugggugugcccuaugaacaguggaagguccucaacgagaucgaugcgggcgucugugaggaaaugaccuacgaggaaauucaggauaauuauccacuggaguucgcccugcgggaccaggacaaguaccgguaccgguacccuaaaggggaguccuacgaggaccugguccagagacuggagccugucaucauggagcuggagaggcaagagaaugugcuggucaucugccaccaggcugugaugcgcugccugcuggccuacuuccucgacaaggcagcagaacagcugcccuaccucaaguguccgcugcacacaguccugaagcugacuccuguggcauaugguuguaaaguggaguccauauuccugaacguggcugcugugaacacgcaccgggacaggccucagaacguggacaucucaagaccuccagaggaagcccuugucacggugccugcucaccagugaccauguucauccacugugaccacuaggcaggcacugcucucugcagagggggucauuccaggcccuccagugugugugauagucaccaugccaugcagggauauucuugaagccacacauggcuggcggaacccagagcccccaccccagcccaccuggcucuuuguugacagucggcgacaagguugugcguggcuccugaccugcugcuaagagucacuugaccagacugcaucugcaugggcugcgcggagguugcccagccccaguuucuuccggcgcagcucuuagguguucacucucgccagcucaguuggcuuugugaagugugaaacccuacaaugugaaaggaaagugcuugcugugauguuccuacuguggcccagcugcccagcauggaccuggugacucuccacagggccucuaccauccucucuguggccacuuccugagccagaggccaggucuucauggggcccugagcuucugcugccucuggugagagggagagcccuucccauccuuacccaccaggaacuagagccccaaccacagcagaugcuuccugggcagccacuggccaggccguuguauccaugucacccuuaguugugggcauucaugaaagcaaugcgcuugcuucagcacauugggaugcacagaaacgugagggcaggggggcaguuguggucgccccuccccaguugugcauguacccggcuacuuagguaugcuuaggggagcugguggccaggggugccccuucaggccugcucucacagugaaaccacuucaagacagggcaggaaguuaccuuccuggugcacacaccgaagugcucgagggagaggcugccgcccccucuccccuucccuggcuguggacacuggcagccaauggggaggcggccucuccccuguugcugcccguguccacacaggaauguacacugguggcagaaacaugcauuugccauaaauaauucagaaacacuuguaugguccuguaaaacuucucugguguuuguugacuucugccugugggucugaggaagggagaaggcagaacccauaggcagucccugggcaagggaggauuuucccggccgcagcacagccuuccauucaugugcacgugagucuggugaaaauggccuugugaaguccagugucugucaugccccugaguucuuuuggucccagagaggcagccugggcagucuguuuacagcuggcaaacagacuggcuggcaaguuguggggcugggucagaaagugucuggacuuguaaucgggugcccugcuguccacagguggacucuggggaagccaggccccuggaucccaaguccuuuguguccggagccuuuccuggccugugccuggaggguagcacaucuuuccagccucccagggcuuugcagccugcagaugccaccugucccugagagaaguuagcgucccuggcccuggccgguggucucucauccuugugugcugcucugcuaagagauguccaaggcggagccggggcaagauccuuccagacucaucugucagagccccaagcccuuuagacccagagcccaaggaccaugccuuugggacauuaggacugcagccuuugcuucuguguauuuuggaguuuuggugacuuuugucaccuggacacacucauuuguuagccauaguggguucccuuggucagcaacagugcauguaccucuggaugucaucugaggugagaccaccgaggccuuuucucucuguguacagaggggaguuaggaguugcuggacuggaugcauuacgaggacuggggacaggguagagggacauccagggaucagggcaugagugggggcaaccccccggccucugcccuggcauggucuccgcaugggcugagguguagcugauuggcugccacauuucggccaugcuggcuggcgugcccauguugcagauauuuucccgaguuccccagaauggaugguauugaaucucagccacaugcaacacuguguccagcauucuuugcaauaaauacuuuuuaaaaaauaaaaaaaaaaaaaaa

SEQ ID NO: 33 - protein, 469 aa, Homo sapiens
MASPRELTQNPLKKIWMPYSNGRPALHACQRGVCMTNCPTLIVMVGLPARGKTYISKKLTRYLNWIGVPTREFNVGQYRRDVVKTYKSFEFFLPDNEEGLKIRKQCALAALRDVRRFLSEEGGHVAVFDATNTTRERRATIFNFGEQNGYKTFFVESICVDPEVIAANIVQVKLGSPDYVNRDSDEATEDFMRRIECYENSYESLDEDLDRDLSYIKIMDVGQSYVVNRVADHIQSRIVYYLMNIHVTPRSIYLCRHGESELNLKGRIGGDPGLSPRGREFAKSLAQFISDQNIKDLKVWTSQMKRTIQTAEALGVPYEQWKVLNEIDAGVCEEMTYEEIQDNYPLEFALRDQDKYRYRYPKGESYEDLVQRLEPVIMELERQENVLVICHQAVMRCLLAYFLDKAAEQLPYLKCPLHTVLKLTPVAYGCKVESIFLNVAAVNTHRDRPQNVDISRPPEEALVTVPAHQ

SEQ ID NO: 34 - DNA, 85634 bp, Homo sapiens
gcggagcgtgtgacgctgcggccgccgcggacctggggattaatgggaaaagttttggcaggagcgggagaattctgcggagcctgcgggacggcggcggtggcgccgtaggcagccgggacaggtcagtccgagacgagagaagcggtcaggcaagtggcggagggaagcgccgggcctgggccgaggcggccagcgggactggggcgcaaggcccggcggcggggaacggggtgcggggagctgccggggtccgcggacagcgtcacggcggcttcctgatgctccggcccgctccggtcagccgtcgtgcgttgccatgtaggcgccccgctgaccctgcgcccccccgcccttggacccccatagctgcttgagtgagtccgaaatacgggcctccttccaccctactctttgccccctcttgggcctggtggcttcgtcttctcccacttgtgagaaccccgtctcaggcccgggggcctctcccattcccctcccctgcctctgacctcttccttcacccgtttctggtgttcctgaatccactgccctatctagcgagagtcttctctgggatcttttcctctgtccccctcgttatccttgtctcctgccttcatcctcccatccttgctctctcaggctttactctctctccccatccctgtccccttcttatctgtggtctgatccctcctagtattatgggtccccatcctcttccccagggtgttcctaggctttttccaactccgtgcctgcagtccctgtctccctaagactctcaccttggttccctgagaggccctgtttttgctcctttttccgatttccttcgtatcaattctgtcccctacattcctgtcgcccacctccttttctctccctgttcctttcccctgcttcagggagaagccttagctccacactctactctactttcacttgacctgcagttgacataaccatggggtgggggtggaggtgttcagaccttgatcgaattaagaggctgattgactaaaggaaataacagattgtgtgggagaatgtacgtgggtgttgcatcagagatgatgtccaatttgtaggccattcttcttatctcagctttaatacttcccctttatggggctgttgacttccaggaacccttgggggagacggcgctgagctggatgtgtgccacgggtagccggaggctttgtccaattcttttccccttccaggaaccggggttttgtgtctttccactctggatgtgtggaatacacttataccatgataccccagcctctctctgccctcactcccaccctccaccctgtgctccatccgaaaggactaagagaattctccagaagctgtgctccagaaaatacttgtggtcctcaaccttttttctgtgtactggctccagaacttttttttttcccgtttgagttttgaaatagattgctggcctgatagccctggggctggcgggcatctgtccccttttattattggtggcttgaaacagctgctgattttctctcatatctctttgacaatctttggccaactgaatgtgcctctgatgttggtcactgaacatgttctcttggagtctcttctccctcttttttctttgttcttttctgaatctagggaatccaaattgtccctctttttccctgggagcttaatttcctctgtatccaggaggaacggcaatcccagagctctgttccctttgcccaggcatagtatgaggtatcagattgataactaccctggtgggctgtggggctgcagtagttagaccttgtcaggaacttgagcagacacatctgcttccagtcacatagatcatcttctctggggcttgagagcccaccaccttccatgtgtgtctggatgtttaaccttaccaagcagaagattctcgtcatatccttcagtttgagctcctttatttggcgttggttctctaaagaagtattcaagaaataacatatcctttgtttctacccagtctgatcttggaggattctgaaagcgtgacccactctcatgtttagaaatgaaggctcattgtttcacctggccccaggtttctaggggctcctcttttgatgattgtgctgtctttgagccagattggacatgggagttggcaacctttaggagctgcggtggagagccaaaggaaccagcttgaccagactttaaagttttgtaatcctcttgtacactgttttctgtgaaagcaataggattgtggatggcctgttgttgagccagtcccttctccactgacccccagaccccctttgcagcacttgcaaagatttgggtagactggaccagagggttttccttgttcctgtgaatagcatctctccagggttttagtggatcattctaaagaggtagaggtcaagtgttggacagatttttagtctagtctctggctttcaaggactcctccttactcttttgagcagtttgttacttctggccgtgcttaccccttagtagtgctctctgctgtggtggcaggtgagagatttgagaacaggtcaaggccagtccttgtggagcagcttgggcaccagcagccctagatggatagcttcttgcagtttgtccactctcattttctgagaaggtagtcatgattgtcaattaccaaattccttccccattcagtgatttttgcagagtctgggtctggattttctttccttctttcttttctgacacaaggttttgttctattgcccaggctggagtgcagtggtgctatcatagtgcactgtaacctcgaactcctgggctcaagggatcttcctgcttcagcctccagagtagcggggactacaggtgcacaccaccacactcagctaattaaaaaacaatttttttgtaaagacaggctctcacaatgtctcgaactcctggcctcaagcagtcctcctcaccttggcctctcagagcactgagattacactgactgctcgttcaggtgcctttctccttgcctcttcaccatggccttcttgtgtgatatatgccttaacccattcaggaagaattgctcctactcagcctttcaacccgacctgtggtcccttagacgccttcccttagggcctggtaagaggatagacagtgtagagcactagcctgggaagccattaggcctctgctttgggcctacagctgtcctgactgttgtgcaagctgtcttcagggcctgcagattctggcacatcctgggatagtgcagctcctctctctcaggagttggacctgtcacttttttttcgttttttttttttttttttttgagatggagtctcgctctgtcgcccaggctggagtgcagtggtgcgatcttggctcactgcaagctccatctcccaggttcacgccattcttctgcctcagcctcctgagtagctgggactacaggcgcccgccaccacgcctggctcatttttttttgtagttttagtagagacagggtttcaccgtgttagtcgagatggtctcgatttcctgacctcgtgatctgcccgcctcagcctcccaaagtgctgggattacaggcgtgagccaccacaaccagcctggacctgtcacttctaagggcttcagctatatcctgtccctgaggcccacctccctgagtgctctctgcaggctgggaagctgaacagtggtgccttgctccagtgcctctgaagggcttggaaattgcaggacacagctttactgctcagcattgcccacactggaaacattctcttcctccctacccaggtctctgtgggctttgtccgttctgccaggcccttgcttatatgatgtcagaagccctgtgcccggtgccattgtcaatgccatgtcccagattacctaatggctgcttcttggagatggtttggtgtccatgcacatttttctctgccgttggagccagggtgaggagctgcttgcaacagctggattccagggtgtcagaggagcccttggagcttgccttgagcctggcagggagaacatggccccttgcatcaggtttcagacatatgggtcttcttccttggcagatggctcctagccttcataactcagcaggctggtgattggcatgtgactccagttcattctgcaggggctttggtgaaggcatcaactatgactcaggacatcttcatttatgagcttctacccagctcccttcttaccttgcctgcgccttctgcgccgacctgataaaatcagcaaagccagtgtctgcttacttgggagtgagcagactccttccaggattggggaaatatttgctgactcaggctcagaatcacatctcagggtggtgtgtaagggaccgacgaggagccagattaccttaggaacactctttgagttacggtgggtataacttattagagttgctttgagggcccctggcacctgtcagctaaagctgttggggttttttctatcctgcagtgttgtacagtgttttgggcatgcacgtgatactcacacagtggcttctgctcaccaacagatgaagacagatgcaccaacgaggtaatcccattttctttactcaggggtctctgaccaccactgacacaggatccagatttaagatcctgaccttgaagatgaaataatttcactagggcttattcccagattccaggttcctgtcacagcatctggtaccagttgcttatgcatagtataggcatttattaagtaattattgaaagtctatggcttacatagttttttcaggagcatggagattcccacctttgcgcccattaaaagataaactccacagggcagggagttgttttgctgcctgttgtgtctaggatagtgcctggcacagaggagataatgaataaatttttgttgaatgagtaaatgaacgaactttcgtctttgcctatatgggtacctagggtgccaggccacaaagatggtgtccatcattctctcttattagggggcaaatatatatatatatatatattttgtttgtttgtttgtttttgagacgaagtcttgctcttgtcccccagactggagtgcaatggcgtgatcttggctcactgccacctccttctcctgggttcaagtgcttctcctgtctcagcctcccaagtagctgggattataggcacctgccaccacgcccggctaatttttgtatttttagtagagatggggtttcaccatgttggccaggctggtctggaactcctgacctcaggtgatccgcccgcctcagcctcccaaagtgctgggattacaggcgtgagccaccgcacctggccttttttttttttttttgagatggagtttcgctcttgttgtccaggctggagtgcaatgccgtgatctcggctcactgcaacctccgcctcttaggttcaagcgattctcctacctcagcctcctgagtagctgagattacaggcatgcgccaccacatctggctaaattttgtatttttagtagagacggggtttcaccatgttagccagactggtctcaaactcctgatgtcagatgatctacccgcctcagcctcccagagtgctgggattacagatgtgagccactgtgcccagccgggaacaaatatttttaagtgccaactatgtgccaggcacttgggaaatgataatagtaaaaaacagatccaatctctgcctcatgggtctgtggtttgctggtatatatgagagctggccataacacacagaattgtttcttccatctctgcaggggtaggaggttctcaccaagagtctgaacaatgctctgggttcccattgctgtttccatgttctcaggatgcctggcaggttttataaactctcagaagtggagctccagggaatacaatgttcattgtcctatttggaaggctgggttgttgtgggtccctgctgggggccggggaaacgtgggcctcctgcctgatttgttttaatctctgaagttcagtggttccagtagctgtttgtgggcttcacttccccttctctgcctttaacaccctgcaggttttcctgttgtcagacagggtggtgagtccctgtgtctctctgtctgtgggggtcaggttgtttgtagatctttcaggaaggtcctgggtggggggccctcctgctttcaaacccataccaagtgctttcctctgaagggaatgtgagggaggaagaaggggggagtttcagagacttctgaggttccccaagagggaagaggtcaaagtacctcctgagcggggagagctactgagttgaactgatttgctttgccatttgctttagcagcagccaggcccagtggcagcaattgtacgtgcatttccaggggtcagttgtccagttcatccctgagccttgagctcccagtcgcaggtaggaacttctcttctcctttctttttttttttttttttgagacggagtctcgctctgtcacccaggctggagtgcagtggcgcgatctaggctcactgcaagctctgcctcctgggttcacaccattctcctgcctaagcctcctgagtagctgggactacaggcgcccgccaccacgcccggctaattttttgtatttttagtagagacggggtttcaccgtgttagccaagatggtctcgatctcctgacctcgtgatccaccggcctcggcctcccaaagtgctgggattacaggcgtgagccaccgcgcccggcctcttctttctttcttgattgggtactgctatatcacctaggaccaggggtgtgtccaatcttttggcatccctgggccacattggaagaagaattattatcttgggctatacataaaatacactaacactaacaatagtgatgagctaaaaataaaaatggcaaaagaatctcatgttttaataaagtttacgtatttgcgttgggatgcattcagagctctcctgggctgcatgcagtcatgggccatgggttggataagcttggcctccctaggcagtcctctcaccacagcctcccaagtagctgggactacaggtgcacaccactgtgcctggctaagttttttttttgtttgtttttgtttttttttaatttaatgggtacatagtagtaggtgtatatttctttttttcttttcttttttgtttttttgagatggaatcttgctcttgtcacccaggctggagagcaatggcacaatcttggctccctgtaacctccacctcctgggttcaagcgattctcctgcctcagcctcccaagtagctcagattacaggcgcccgccaccacgcccagctaatttttgtatttttagtagagatggggttttgtcatgttggccaggctggtctcgaactcctgacctcaagtgatctgcctgcctcagcctcccaaaatgttgggattacaggcatgagctaccacacccggccttgtatgtcttcttttgagaaatgtctattaaaatcttttgcccatccttttattagattattcgtttttttcctatagagttgtttgagctcgttatatattcttgttattaaccccttgtgaaatgggtagtttgcaaatattttctctcattctgtgggttgtctcttcactttgttgattgtttcctttgctgtgcagaaactgtttaatgtgatgtgatcccatttgaccatttttgctttggttgcctgtgcttgcggggtattgctcaagaaatttttgcccagaccagtgtcctggagattttctcctgttttcttgtagtactttcatggtttgaagtctcagatttaagtctttattttgatttggtttttgtggatggcaagaggtaggggtctagtttcattcatctccatatgaatatccagttttccaagcaccatttattgaagagactgtcttttcctcagtgtatgttcttggcacctttgtcaaaagtgagttcactgtagatgtgtggatttgtttctgggttctctattctgttccattggtctatgtgtcttttttttttttttttttttttctctgagacagagttttgctctgttgcccaggatggagtgcagtggcgtggcgtgatgttggctcactgcagcctctgcctcccgtgttcgagcagttctcctgcctcagtctcccaagtagctgggattacaggcatgtgtcaccatgcctggctaattttttgtgtttttagtagagatggggtttcaccatgttggtcaggctggtcttgaactcctgacctcaggtgatctgcccacctcggtctcccaaagtgctgggattacaggcatgagccaccgcgcctgggcgaaagatggcttattttgaagtcaactttagaatattataaaacagcattctcaaactttttggcctcaagatccctttagattctttttttgtttgtttgtttgtttttgttttttgagacggagtctctctctgtcacccaggctggagtgcagtggcacaatctcggcttactgcaagccccgcctcccgggttcatgccattctcctgcctcagcctcccgagtagctgggactacaggtgcccgccaccacgcccagctaattttttgtgtttttagtagagacggggtttcaccatgttagccaggatggtctcaatctcctgacctcgtgattcacccgcgtcggcctcccaaagtgctgggattacagatgtgagccactgcgccagtccctttagattcttaaaaattattgaagaccccaagggcttatgtttaccatgttagaagttataataggccgggcgggtgacattcgttaatatcaccactgatctcatttttaaaaagtctttaagtattgggaagctgtcgggctcacagtggtcaatacacgttttctaaatttgagttttctcttgaaagtttgatttttatcattggtaacatactgttggttcttttgtttgattttgtctgagatagcatctccctcagtcacccaggctggagtgcagtggtgcagtcatagctcacttgcagcctccaacttctgggctcaagtaatcctcctgcctcagcgtccagagtagctaggactacaggtatgtgctaccatgcccagctcattttaaaattttttgtaaagatggtgtcttgtgatcttgctacatcgaccaggctggtcttgaattcctggcctcaagtgatccatctgcctcagcctcccaaattactgggattataggcatgagccaccacacccagccttttttttttttttttttttttttgatatggggtctcactcttgcccaggcttgagtgcggtggcacagtcttggctcactgtatctagccttgacttccaggctcaagtgatcctttcatctcagcctcccaagtagctaagactacatgcatgcaccatcatgcccacctcattttttaacttgttgtagagatcaggtctccctgtgttgtccaggctggtctcaaactcctgagctcgagccattcattcctgccttggcctcccaaagtgctgggattaaaggcatgagccactgtgcccagccagttcttttttgttttgttttgttttgttttgagatgaagtctcactctgtcacccaggctagagtgcagtggtgtgatctcggctcactgcaacctccgcctcgtgggttcaagtgattcttctgcctcagcctcccaagtagctgggaccacaggcgcgcaccccaatgcccggctaatttttgtatttttttagtagagatggggtttcaccatattggtcaggccggtctcgaactcctgacctcatgatctgcccacctcagcctcccagagtgctgggattacaggcgtgagccaccgcgcccggccacaaagaatatttaaaagacagatatcaaaggtggagattttaataaagttagtttttatttattcatctaggacattcttaaattggcattttattgtctttcatggttctgtggattaactgggcccagctgggtggttcttgcttgggatatgtcatgttgctatagtcaaatgaagacggggcaggtgtcatctgaaggctcagctgggctgggtgtccacgctggcttaggcacatgggtggcacttgatgctgttgaatggagtgcgtatacatgacctctctatgtgccttgggcttctcatagcatgagagctgggttctgagcagaagcattcccaaaatgaatgtattgagagattcagaaagaaatgtcaatgtttctcatgtcctagccttggaagttacacagtgccacttcctctattcccttggtctcaggaccagttcagattcaaggagaggactacacaagggtgtgaatactaagaggcgtgattcactgaggagagaaacaggcctccttggagaccagctactacttttcagcatccttatgtgaggtaatgtggtcttgatacttccaagagaaaagcacatcttctcatgattttcattcctggaagctactgttagttaggaaattcctaataggttgatggaggacattgaatgctaggtgaaggaatttgtactctgttctttgggcaatgggggagccatcagtggttttggagcaaggagtggtggtgttaatattgcaaaaaggtagattaggaatggagatagagaggataggtaggggactgcagtggtctaaatgtaaggaaattcttcttcacattaaatctgagttcctctggttgcaatttaagtgtattgattttgatatttcagccacacagattaagcacccagagccagggtggaataacccatccctaccccatatccatttagggctgttgatgcacaggagagattaagagttcacaaactttagaaggcaactaaatttaggttttattgtcaaagcacataaaaagttaagcataaattattcaaaaataaaaagcaagaaaggtgaaacttcatttaacaccactaaccatgtttcaaatacgcttcagtttcagtattatagaagcaaggagtggagccagaggaaggaatggggaggacaaattagagaatggtaggaagagggacaaaagtaggggaagaaaggagtcaggaggggcacacagcagaaagaatttgaaggaggtcagattggagcaactacttgaagctgagagaaggctccgtatggggctaacatgttagcaaagagctggtgccttctgtgtttccctgaggcactggcttctgggttttagcatctggtatcctcaccctttctttaatacagacagtccccaacttatgatggttcaactttacagtgatgtaaaagccatacacggctgggcgcatggctcacgcctgtaatctcagcactttgggaggccgaggtgggaggatcacgaggtcaggagattgagaccatcctggctaacacagtgaaaccctgtctctactaaaaatacaaaaaattagctgggcgtggtggtgggcgcctgtagtcccagctacttgggaggctgaggcaggagaatggcatgaacccgggaggcggagcttgcagtgagccgagtgcatgccactgcattccagcctgggcgacagagcgagactccgtctcaaaaaaaaaaaaaaaaaaaaaagcgatacacattcaacagaagccccatcctttagtactcatacaaccattcttttttttttttttttgagatggcgtctcactcttgcccaggctgcagtgcagtggtgtgatctcggctcacagcaacctctgcctcccgggttaaagtgattctcctgcctcagcctcctgagtagctgggattataggcgactgccaccaggcctggctaatttttgaatttttagtagagataggatttcacaatgttggccaggctggtttctaactcctgaccaggtgacctgcccacctcggcctcccaaagtgctggaattacaggcatgagccaccgtgccccggttctcatacgaccattctgttttttcactttcagtacagtattcaattacatgagatattcaaaattgtaacataagctctgtgttagatgatgttgcccgtaggctcatggaaatgttctggcacatttgcagtaggctatgctaagtaagttatggtgttcggcaggttacatatattacatgcgtttttgacttgtgacgttttcaacatatgatgggtttgtccttataagttgaggaacatttgtagccatttcatcgtctgtgaagaggcctgagtggattttgtgctggagaccggtgtgactcagctccagtgttgactgaccttctaaccatgggcttgtgactgaatgtcctgagccttcattttcttccctgtgaggattaaaatgaacctcaggaaatgctggcttgtcctctttctgtcaagctgggttctgagggggtgagcccaggtaggagtgacttctgaaccagcccagatttacaggcttgggcatagggagcccagcctcagcctgggagcctcatcttccattaaatagctcctggcattcaggggagtgcgttgcagcaccccatttttttttcattgaagtcctgtcttccagccaggcacagtgaatcacttgaggccacgagtttgagaccagcctagccatcatggggaaaccccatctatactaaaaatacaaaaattatctgggcacggtggcgcacacctgtagtcccagcacaccagagttcaagaccagcctgggcaacatggcgaaaccccgtctctacaaaaaatacaaaaattatccaggcgtggtggtacatgcctgtagttcctactccttggggggctgaggtaggagaatcactcaagccgaggaggttgaggctgcagtgagccatatttgtaccactgtactccagcctgggtgacagagtaaggccctgtctgtaaaaaaaaaaaaaaaaaaaaaaaaaagtgctttcttcttcttcttctttttttttttttttttttttttttttttttgagacggagtctcgctttgttgcccaggctggagtgcagtggcgtgatctcggctcactgcaagctccgcctcccaggttcgcgccgttctcctgcctcagcctcccgagtagctgggactacaggcgcccgccaccactcctggctaattttttgtatttttggtagagacagggtttcacggtgttagccaggatggtctcgatctcctgaccttgtgatccgcccgtctcagcctcccaaagtgctgggattacagtcatgagccacgatgcccgacctctttcttatataatttttttttttaatcgggcagccctcagaatcacagcagattcagaaagactccccagaaaagttctttcactcctaacttctacccagcctcatggtcacctcagcagctctcctgagaccgttactaagttctccacagctaatggtaactcagcttggaaagagttctcttgtaggaggatgctgaagggaggttgccaagtggtgtgggaaactgcttcatgcttaagttcacttccatatcatgatactaaaaggtatctaacagctgattttcattgctttcatttgtgatctgctaggaccacttgatccttatcactgcttttggcacactcctcatccaagagttgatcgcagaggcagagttccttgccaccagtccagtggaagtacaagccaactttgctctccaaatggcagcagtagctgagcaggccgccctgcattctctcctcataaacatgctgttctcaagtttgtcagaatccagagctctctactcattacccccttttccaaacaagcaagcaaagcatgctcttcctttgtttcccttaattgcctaaaacatctccatgctcatagctgttgactctctttgcctcctagttcctgttcctctggtgtaggatttctcagccctagcactgtaaacatgttgggctggataatcatctcttgtatgggctgtttgtgcattgtaggatgttgagcagcatccctggcttctacacactaagtgccagtgacactcttctcccctccccagctgtaaaacccaaatgtctgcggacattgccaaatgtctcctagggggcaaaatcacccctggttgagagtcactgctctatcatttattcactaaatactgctggtcagctgggtccactggcgaacctcacatcaataaacctggtaatagaagcatattgttcttacattagaagtttactctcttcagttatctcactgggcccttgagggctttggggaggagtgatgggaaatggtttacaattaacagcatattccaatgaagaaagaaagcatatgatgtctgcacaacagaggagagtgtccacaatgtacagctcttccctggagcagttatgtttctcagggtgtgcttttccaagtcattttgtgtctggttagaagccaccttcccttagcatccagaggtgccatgtagactagggttggtcacagtgtgtagattgccattgacctgcccattcctagtgtttgacctggtggtcatggcactctgaccacatcagttttcctctccaagcccagatgggttctcagaaccctccaccccaagctgcactcatgagaggcggcacttctgccatcctgatctagagcttgttcatgtggtccagaccatttctttgcagccccctctcctgtgtaaaagcctttaggaaagtgcagagatcctgatggattccccttgaccctcagcacgcacatcctggtatgtagtgctcagcactccgttgggggcttcagactggagaagagaaaactgcccttccctttcaaggacatcctccaagggccagaatgctcagttccgtaaaattaactctccactgcctacttttttttttttttttttaagacagtctcactctgtgccccaggctggagcgcagtggtgtgatcttggctcactgcaacctccgcctcccgggttcaagcaattctcctacctcagccttccaagtagctgggattacaggcatgcgccacctcacccagctaatttttgtatttttagtagagacgggatttcactatcttggccaggctggtctcaaactcctgacctctagtgatccacttgcctcggcctcccaaagtgctagtattacagtcatgagccaccatgcctggcctgctgcctatttaaatagcaagcagttacagttaaagaaagaccctggcctggggacgctgccaaggctcctaatctgacacttctttcatgtggaccagggatctgaactgtgtttcttccaaacttttggagcttgcttccttggtggtaagctaaatagtggcccccaaaatatacccctttataacccctgtaacctgtgaatattatatgacataatggactttgcacatgtaattaaattaaggatcttgagatgaggggattatcctagattatctgggtggacccctaaatgcaatcccaagtgtccttatgagtgggggccagagagagagattggacacaggagaaggaggcaatgtgactactgcagcaagatgctacactgctggctttggaggtggaagagaaggccaaaaatgcaacgaacgtagctttggaagctggaaaaggcaaggaaactgttttcccttagaacctctggaggaagtgtggccctgccaacacactgattttagcccagtgaaactaattttgaatttctgacctctagaactgtaagagaataaatgtgttttgttttaagtcgctaagtttgtggtaatgtggtaatttgttacagtgcagtaggaaactaatacagggctcatctgcctccaggtacaagtggtggcttggctgatccctgttcttattttaaggcgtccctctcatggcacaaggagagcataggcccagcattttcctgaaccagtatttgaaacaatctgcactttgggggaacctgttggggagttcttggaagcaagagagaaagcctcatatggtacccgatccttgctttggaactctcccagcaccttcagtgatatcatgaacaaagagttctttcagaccagtgaggatgtaggattattaaaatctgattctaattccatcttcccctctcctcttccatttattcaataaatgtttattgtgtacctcctatgtgctaggcactggggatgaagggataaacaaagcagataaaaaatctcctgctctcgtggtaactgaggtgggggaagtggagggagccagagttaagtcaacagcatgtgagatggcttcagatgctctctagaaaactaagcagaaaggagggtagtggcagttccacatagagggccggggaaggtctcaccacgaaggtgacatttaagtggaaagaggagagtgaactattgtgggaagaatctcgcaggcagagggaaagcaagttccaaggccctgcactgggacacagctgaggtgttcaacgcatagcgaggaggccagcgtggctggacagagggagggaggagaccaggagatgaagttagagacgagattggtggccctgaagtgccataacagcttttactttgcttggcattttgccccttctttctcctctcctccccctcacaccacctcacgagttttaggcccatgttcctcagttcctttccatgggatatttatcccatcatacttagggactaccagcaggcaaacatagtcacttaaaaatattagaagagggggaaaaagcagcctcctctttctgaatgatgaaagcagttccatggcagtgttggcatggcactgtgtatctagcagtgcaggctggccattcaccgcgtagttctgggtggtttctgagaggttcccctccatggccttcttcagcccatgaggaagtccaacccccctggcccgctgtttctttccatttcacccctcttggtctccccagtgggactcccacagctgacttctatccccacctgtgtctaatcccctttccatggctgagccggtagataacctagtaacgatctgagtagaatatggctcccacatgttgaatgcattgtgctgatcactacatatatcactttgattcacacaacaaccctgagaggtaggaaccattgtaccccttttagagatgaggatactgaggctcagactggttaggaaaattgcctaaagttgcacagctaatgaatggcagagctgggatttgaacccaagtgattaaagcccatgtctttgatcactacatagcagggccttctaggaaggatggctggctggatctagttgttccagtttggaaagtacctgcttgactggccagactgctgttggcttcagaaaatagcagtctcttgttggtcactgagaagaggcaaaattttggcaggccttggggcctcctgcagagtctcattccaggtcagtggacagaggaggccctgagaatagtcgtgcatactggctccctggatctgctccaagacagtgagcagcccctagaaccacaagagactggccagccaagctgtgggcccggcctgtagggtggaaggaactcttaagagaaaaaaaaaatctctgctgtgattaatcaacagcttcagtctggtgaagtgaaaagagaaaagttggcccagatgtgcacatagggagagaaataagggagggaaattgcctttattcatgttctcccttaggccagtcgttaccccacggatgagatcaccttccttttacaccagcctgcaagaggtgtgtagtggtagtctcattttacagacaaggtgtaggatcagagaggttaactcgcccaagtcaaacagctaacaagtggtggaattggaatttgagccctgttcttctcagttcagtagccctgctgttcttgctgatgtcacctcagcatgggctctccaggtatgtgcaaatagttatgcaagtgttgcatccacaggcttgtgagcagaggctgaaagggagccagggctcttggtacttgccctctcaacatgggccctgcctaagctagcaggactcactatacccaaaccagcagtggcattatatttttctcttttcttgcaccttgccatccccgatttatttttagagagccttttctatttctgttcccatttcttggcttggatgcaggggctggggtgcagggatggcgctagaaatcagaagaggcaggcatagatggcatctcactggtggccttggctggtctctgggaactgtgcccatctgcctgccctgctggctcctcctcaggccagctgtaggccccagggatcatagagctcgggtagctagaggctgggagggcaggcgagacagagaaacagccacacttctcatttctttggcttctcagagggggatgagcttcctcctggaacagagaagggagtagctcactgcctgtttctcagggttaggttacggacttctagggaatatggggtagtgcttaagagccagactctgtgtggcatgggggtgataactgtagaccctccacctctggggattaaatgagctcatacatgtaaaggcacagaggaggcactcactgaatgatgattgtttcattagtgtctttagaccctcagcacccagcaccataggtggatgccagtcattattggttagaccaaacagaacttcaaggcagctgggcatggtggctcacacctgtaataccagcactttgggaggccaaggtgggagggtcacctgaggtcaggcatttgagatcaacctgggcaacgtagtgagacccagtgtctatttatttaaaaaaataaaataataataaaaaaagaaaaataactttaatgttatttttgtcgtcctcttcatctgaacattggcctgcgtaggtattaacctgagtccagtgattgtttgtggagccccacagggtacttcccagtgacagcagcctggagtgtgctcctgccagcccctgcctgggccctggaaaaggcagggcagtgcagcgaggaatcttctggcctaaggatgcctgtaaccaccaaaccttatgtttagttttacaccttgctgagggtctggcttttggatatgagctctggagtggtaggggtctgtgtcccatggggacaggtggttctgggtgttgggcacgaggtgatggaggaagggcctgccacttgcaagctgtttatctgactagtaataaacagtggatgacacctttaggaaactgtatttgggagctttgaaattaatcagatgccaccaatggcatttttaatttagttaaaaatgttttagttatataaataatgctcattcgttatagatgattagaaaatacagataagcactgaggagaaaaaagtaatatattatcacacataagtggctgctttgatatatgatttttttttcttacctaggttcttttcaaattgtgtatacctagttattttttctgtctttcgaaatgggatgctgtttaacatttagttttgtgacttgcctttcccatttttcaggtggttttgtggtgtctgcttgtcctccgacctcctctcccatttgtgggaaaggcatttggcctggagggaggcacttgggaagaactgtctggttgttccttgatgttattgccagacttgcagagggtagagaggtgcatgaagtcttactctgcctctccccatctgtgtctctccctgtccctgtccagcgccccatctgctctgcctactcaccactcctgccttttttttttttccttccatacaaatccagaaaaggataccacctccagtctgaaggtttctttctatggcttttagggatgaatctctcaggagtttagaaaaaaagatgcacagacagtatataggaagggtaatgccagggctgggggtgggggtcttgggaagagcaactgagaggagggcctgggtccctggtgctgtcttgagtcagtgagaagaagctgcgtgggtgatgggttggggcggggtaggcagcaggtgactgcagggacctctctgaaacagcaagcaagctggccaggaagacgcctggagaataaggggcccagataggggccagacataggggagaagaaaatgtgtctcagtggcacctgctcctccaccctggccccactctttccatgatctttccagagattctctctttttctgcctgatctgcttccctcacctggcagtgcccagccccagtagtttgacacatctggtatatctggctactgtgctctactgacacctgtgtggcagcagctgcacagcttcttggcatctccctgggcagtaggcagggatccgagcatagaggaagatgttccatgcatcagtaactcagattccgttccagaaacgcatctcaaagcaagggagaaaattgaagatggggtattttgtggggaacaagctatgccttcctgtcacttcttacagaataaaatggggtctctggcagtaggcaaggagaaggcctttctgagcactgagggtcagtggcttctcaggtcttttctgggccactttggcctgcacacaggttgggctaggaattcatgcttaaaagcaggctgatttccataggctgtgcgttcctgtgggcctgcctggatcatatctgttctgctgtgatcccaggcctggtgagacccactggcttcctgtacgtcccctcaaagcctgcgccaccgcctctcccttcaccactcccaagctataattaagttcccatgtgaaactgtatccctcagctgacacacgcttgtaactacagccctggccattggacggctcatctggggtgacttctggggctggtgcctcagcctccagacgctctccagtaggtctgagtaggtggtgtggacccaccaggaaagggtggatccagtgaggcgggggccaggccttgcccaagagtcagaaagtgggaagtcacgggggagatgaagggcgagtgagcagctagaaagtgccaggggacacaaaaatgggggagacaggcagccttttggggctggagggcatggacagggtgactgatgcctgagccacaggcagaatgtgagcagtttattttattttatattctacatatttttatagcataaaattaagatatagttcacataaccaaattcaccactttaaagtgtgtactttgatggtttttgtatattaactgtgttttatatattatattaaattaatatatttatatattatattaacggttttatatattattttagctgtgttgtttatatattatattaactgtgttctattaaccactaattccaggacacttctatcacctaaaaaaccctttacctgtcagcagttactccatcccttggctgctaatctacttcccttctctatggctttccctatcctggacatttcatatgaatggaattatataatatgtagccttttgtgtctgaacaatttcacttagcatgttttcgaggttcatccatgttgtagcatataatagtactgtattcctttttgtggctgagtattccattgtgtgtatatattccattttatttattggtaaattggtggacatttgggttgtttccattttttgactgctgtgaacattcatgtacaagcttttgtgtggacatatgctttaggttctcttgggaatatacttagtgaaattgctgggtcatatagtattccatgtttaacttttttttttttttttttttgagacggcatcttgctctgttgcccaggctggagtgcagtggcacgatcttggctcactgcaacctgaacctccctggttcaagcaatttccctgcctcagccacctgagtagctgggattacaggtgcatgccaccacgcctggctaattttttttttgtatttttagtagagacgaggtttcaccgtgttggccagactggtctcaaactcctgacctcaggcaatctccccgccttggcctcccaagtgttactctttgttttttgtttgtttttttttttgagacggggtctcactctgtctggagtgcagtggcgcgatttcgcctcactgcaacctccacctcctgggttcaagtgattcttctgcctcagcctcccgagtagctgggactacaggcgcatgccaccatgcccagctaattttttgtatttttagtagagacggggtttcactgtgttagccaggatggtctcgatctcctgaccttgtgatccacccgcctcggcctcccaaagtggtgggattacaggcgtgagccaccgcgcccggccccaagtgttactcgttaggcagatacctgatacctgtctgctatactcactggtctgcaccttgcttcacttattatatcttggccatctttgcataccagacatgtagagcttccttattcttttttttttttttttttttgagatggagtctcgctctgtcacccaggctggagtgcagtggcgcgatctcagctcactgcaagctccacctcctggttcacaccattctcctgcctcagcctcccgagtagctgggaatacaggtgcttgccaccacacccagctaatttttgtgtgtgtgtgtatttttagtagagacagggtttcaccgtgttagccaggaaggtctcgatctcctgacctcatgatccgcccgcctcggcctcccaaagtcctgggattacaggtgtgagccaccacgcccagcccctcattcttttttttttaacagttggctcatccattgtatggatgtgccagtctcttcttttttttttttagacagatttttgctctgtcacccaggctggagtgcagtggcatgatctcggcttactgcaacctctgcctcctgggtcaagcgattctcccgcctcagcctcctgagtagctgggattacaggcatgtgccatcatgcccagctgatttttgtatttttagtagagacagggtttcactttgttggccaggctggtcctgaactcctgatctcaaatgatttgctcatctcggcctcccaaagtgctaggattacaggcgtgagtcaccatgcacggcctggatgtgccattctcttattcattgatgaatgtgcaggtgacttctagtcttttttggcaatgaataaccttgtcattttacacacagataaacagattgacaatgcttctgtgtgataggtgcagtaatggagatagacactggggaactagggaaggcttccagaggatagttaagaaaggctcagggtgagtgagcgctggtatctgagtgggccttgcaggcctggcagaatttcagcaggctgagatgttgtaggaagggcaaatatgactgaagaaaagaacaacagctcaggtgtgacaggggaaatgaagagtattagttatctattcctgcataacaaattaccccaaaacttagtagcttaaaacactatctcgcagtttctatgggttaggagagatttacacaaatatgtgaataccagaaggtgaggattgttgccagccattttagaaggctgactctaatagcaagttgcagtaaggataggattggccaaggcaacagatggagccatgattgtggacaatcttacatacttagctgagaggttgtcagagattgatctgagaacagtgtgagccatggaaggtctttgagcaggagaataatgtgatagttgctatacaggacaattaatctgatagcatttatgctagaggggtcaaaatggagagagatacacaggcagaggcctagattaggagatggctatagtagtacaggtgagaaattcctggcctgtagtactaaatacttttttttttttttaagacaatctcactctgtcacccaggctggagtgcagtggcatgatctcggctcactgcaacctctgcctcccgggttcaagcaattctagtgcctcagcctccttagtggctgtgactacaggcgtgtaccaccatgcctggctaatttttctatttttagtagaaatggggtttcacggtgttggccaggctggtcttgaactcctggcctcaagtaatccacccactttggcctcccaaagtgctgggattatgggcgtgagccgctgcatccggcctctgtattaaatactttagctgcatattctttcttcgaaatgaccacaaaaagaaggtattactgattaatatgcatatggtcttgcgtatggccagacttatgacttgcgtatggtcataaaggtagtaagttgcagagcagcactcagacctgcctggctttgatgaccgtgccttgatggcactggaagtggaaaggtgggggtgactggggaggtgaggttttgtccgttccctggatgctaaaaggaaatggaggagtgtaagaggttgattctttgaacctggatggctggggcaaagataacactgtaacaggaagaagagaggccggagggaacactgatgtgatgggagaaggtgagtgatttgggaacatggggcatttgttggcagggtccttcccaattatagggcgagtataaatagttcctgtgctttgtgtatgaagaggtacccttggcccaaaaagactctaaatgtggaaaaaggatatggtggtgtggtggtggtttgaacattgggtttgcgcagatagtgatggtaactggcactggcctgcgcttcagactttcacagcccgttcacttctgttgaaactcacacaaccctattcaggttatcatcattccctatctgattgatgaggaaactaaggctcagaaaaatccatttgctcaaggagaaacagtgtttcagttacctactgctgtgtaacaaatcacctgtgaaactcagtagtttaaaacaaccaccatttatcctttctcttgattgtgtgaattgggtccagatgcttggttctgccccacatgatgtcggccaagcttgcccatttgtctgtgtttagctgcactgtaatgtccaaggcagcttctctttgcatggcctctaatccttcaagagtctatcctgaacttcttgcagcatggcatctgggggccaagacagtggaagccagtcgtgttgaggcctgggctcacgtcccagaacatcacctcaatcatgttctattggtcagagctgtcactgggccagcccagattccaggttgggaactagacgccacctcttgatggaaagagtggcaaaaggtttgtagccatatttaatccacagacagccggtagtggatacctggatttgaacccagatctgtgtgactcagactcacagtctgtcatgccatactgcatccctttctgcttctggttccttgggagttgcaaagcttgctggctcttttgtgtggttggagagggctgatttttcttgtggtctcccacagtggaagttgtactagtcatcccccttttcacagatgagcatccaagatcactgtgtcttagggaaccttccaaaataggtttgctctagggatttgctagcttcccccaagcttcagcagtgatagccagacatgcatggaatttccctgtggagtttccctttctgcgcttagtggccttttgatgcacagtgctcactgggtgggattcctgctgcattgtagccagatgtggaggctagccctattttgagttatcccagatggtatccagcccagtgagtcccatacttgactcaactggcatattcaccagggagttttggggaaaatgtagattcctgggccttcctcatgcctattgaattagaattcccagggatggcgtccaggaacctgcctttaaagctccccattgatttgggagtacagcctggttgggaaaccaatgacttccagaggctggcaccctccctcagcccagtcatttcagaaagatgcctttgaagtcactgatcagaggaggccacatgggagagaatgatttgtccagagggcctcacacttcacaaccaggaagtgactcctgaaagtgtccaggaagtttctatttgaatctgctcaaatctttgatgttgttttgcatgctttgatagtatctgagctttatggtggcctctgggtgtttttctttgaaagtgtttgcagagagtagcaagctcttccagcagtcagcagacactccctaaccaggagctacttggtctgatttatttgaaatatgaaattcctttgcttggctgtctggttggtatctttggtgtgaagaatatgacaaccctagagatacctaggttagcacagcagttggacctttctagtcttgtgccttggacatacttaaggtacacttggaaaagtagattttaaaaccctggataatttggtttgccagttaaataaacttctatattttagaatatttggaaaataaagataaatataaggaagaccataaaattacctagaactttcctctcagagaatttccacggttaatgttttgaatggctattcatccttcccctcatgacccttcacaccccctctttttgaaaaccatattgaagtcatattgaatgttactttttagcagttttgttgagatgtaagtcataaagtccacctgttgacagtgtgcaatttgatggtttttagtatttacagagttgtacaaccatcaccacaatctagttttagaacattttcttagtcccaaaaagacatcttataatccattagcgtgcattcccgcctcgatgccccatcccgcccttactccagcccaagactaccactcatctgctttctctacgtacagatttacctgttctggacatttcatataaatgggatcatacaatatgtgatcttttgtgattggcttctgtcactggacataatcatggtactgttttgaaacctgctttaaacatttatatcctagcaatttgaatatagttttcaagaatgcacttttaatagcagagcggtattcattcttatgagaatatctaatcttatttaatcagtcctgccaacagacgtttaggttatttctcatcttttgctcttatagccagtgctctctgcactcagaaattattttgttgatttattggttaattgtccgaatctgtgactagaacaaaagctctttgagaacagtcaccttctctgtctcccctactacttggcatagttcctggcacttggtaggtattcagtttttaaaggatgtgtatgtgtgtatatgtgcaaattttgaatgaatcaaaatgtaaggatattaataaatgttgccatattgccaaattctagaaagttgtactaatttaccctctcactgcagtataagggtacctgactccctgttcctttgaatctgggttaatttgtacaggaagtcctgtgatcttttgaatgatgatattctctgacctgtcaaccagttagtttgggaattgatgctgtctgtgtcctgaccctgtctgtgggccaggaagggtctggctgttgggaaagatggtggtgtgtgggagctctagctgcccgggtcctcattgtggctccgtggtattgtatcgtttcctgttgcccttagaaaggctgcatcgtgttgtctggccacttcctctattgtgtgcaggcatgttggggagtgagtagagttgggtggataaagtatgtgtaagaagatactggttatggctgctgattggagtgccttttgaagtcgtcaggagagatgtcactctggaagttcagtgtcttcaaaaatagaaatgaagaaatgcttccaggaagtctgatgcaactggcccagtctgcccccatctgagggtggtgggcacccacatggctggtaaacgcttcatgagtcacccactggccacagtccctgctcctctccacacacttcctgtctggaaaagcctgctacccgcccatggtgaagagtcaccccagagaacttgccagggatgcagggcaggtcttcccaggtcacagcagcagcctctcgctcatgggtttcacagcagttcttctccccaagatgagttgtggtaactgctttttagataaatatgtggaatggatggttgggattggaaaaaaaaagagcggctagatggcaaggcagctcttgtgtgtagcagggagctcacacgagccccatggtggggcagttaaggccccagaattcaccttctccagcagctggctgctcattcttttcttcttctcgtggttttcccatcacatttcccttggggtttcttccaggccttcccctactcaccccacaccctctcagaagatgctgcctcatgtaacttggccaagctctcaagcattacagatgcctttaccttcttttctttgcatcttagaaatcactcacatgttggtctctctcacataattgctttttattattacttcagcggttgccaagtgcctactctatgcctagtaccttgttagactcgggaatgatgcagaagaaagagactggaccctgccccctaggagggtaaatgtctgttctcccatggcctctgtttcccttcctctctgactgcgcctttgctgccctggttcctcttcctctttccgctgcctgagtgtcaacattcttcaggcttctgccctctctcctctccctccacgcgcttgtcccttcctgtggctgtgaccatctgctcttatagctaccaaatactaaagttcttttctcctgaaaaccaggtccctgtgtccacctgcctgctggagtgtgcagccttaaaagcagagtccatctttgtctctgctctttgcatatcccctttctgttaataatccgtcattctctcagtttcccggagccttactgacagctttaaacctcattcctctgccatgcacaggtcgttcctcccgttcttttgagtgtttctccccactgattttcctgcctgtagtgagttggatggttgcccctccaaaagatatgtccaagtcctaacccctagaacctgtgaacatgaccaccttgtttggaaaaaaactcattgcagagattctttcctatgctgcagacgtacatgaacctgtgctcattgacctcctctctgggcctggccttgttggtctctggcttgaaatagtgactgtacttctagtccacacagtgattacatatttattactctgtttgagctcccctagtccaaaggcaaagttcactgcctgccctttccactaactcctaggtcagacttgctaggttgtgtgcacagcagctacaagtgtggtttctaaggtgggtctgggtttgaatcctggttctgtcatttattagccaagggcctttgacagattgtaacctttctgggcttcagtttcctcttctggaaaatggagctaatggattgttgtgagaattagattgcatagtgtctagcactgtgcctgacactctgagctttatttttatttatttttattttttgagacggagtctcgctctgttgcctaggctggagtggagtggcatgatctcggttcactgcaacctccacctcccaggttcaagccattctcctgcttcagcctcccgagtagctgggtttacaggctcccgccaccatgcccggcaagtttttgtattttttagtagagacggggtttcaccatgttggccaggttagtcttgaactcctgacctcaggtgatctgcccaccttggcttcccaaagtgctgggattacaggtgtgagccaccacgtccagcccactctgagctttataaccagagagatgctgtggctagccaaatcgctcaacctatacttggaggatcccaagcttggatgagtgtaagagctgtgacttaaatccagcctacttgtatgtcattctgccacagttgtctttgtctctccacagtttgtcctggagctgggcatggtgagggctaagacaatggattacagagctacaggtctaggagggcatgtggaattatgcctatatgagatagatgacaaagtgggtaagagcatgtgctctggagttagacctgggttcagattcaggctctatgaccctatctcagtgaccttgggaaacttttctttgcatctctgggtctcagttttctcatctgtaaattgggaataacaatggttcatacctgtcttagtctgtgctgctataacaaaattcctgagatgggtaatttataaacaaaagaaactgatttctcacagttctggaggctgggaagttcaagatcaaggcattggcagacttgatgtctggtgaaggctgctgtccacttccaagatggcaccttgttgctgtgtcctccagaggggatgaatgctgtgtccttacatggcagaagggtgaaagtggcccagctagttccctggagcccttttataagagcactaatccgttcctgagggcagagccttcatgacctaaacacctccaaaggccacacctcttaataccgttgtattggggattaagtttcaacatgaattttggagggttcacaacattcaaaccatagcaatgtcttatagagtaatcgggatgattaaatgaaagaatgcccataaaacattgaacacatgcctgactctttgtaaacaataattattaggtatcgctattatagagaccagcttctgctgtggagagtgttaagtgccttgatgccacaagccactggacacgcagctgcatggatcaatgtacccctgtaattatgtaacaaggggacatggagaaaaaaacatttccaatgttgcctcctctgtaacatgattgtacccctaaactgcacagaggagctttctgttctttgaactccatagctgttggtacgtctcttgtggggtttgccatagtctgtcttatactatgactgttcttcactctacggtacatttctttctttctttgtttctttctttcttttttttttttgagacaaagtctccttgtgtcatccaggctggagtgcagtggtgcaatctcagctcacagcagccctgacctccccaactcaagcaatcctcacacctcagcttcccaagatgctgggactgctggcatgtgccaccacacctggctaattttttttgtattttttgtagaaatgggatttcaccatgttgctcaggctggtcttgaacttctgggctcaagcagtccacccatctcagcctaccaaagtactgggattgcagtgtgagccaccacgcctggcctactgtatgtttcttgaggtcaagattgggcactgggtaactgattacttgaattgaaccttgggattcagccagtgaaagtggtccacctggcagtagtgaacctctggctcctgacctctgctgctggtgaatctgtttctcctatggctgcacagacacagggtttcctgcctccaaagagcttttccactctgtacatgggacctgaaccggctccagaaaccttggagcctggcaccacttttcacatcacccagcaggagcagaacttagatggaccaggcatagatgggaaacatgggtttattgctaaggtcatggttagttctcggcggtggggcgggggggtttagtgggcaattgctttttggatttttgttttgttttagaagtaaaaaatatgggccaggcgcggtggctcatgcctgtaatcccagcactttgggaggccgaggcgggcggatcacaaggtcaggagattgagaccatcctggctaacacggtgaaaccccatctctactaaaaaatataaaaaattagccgggcatggtggcaggcacctgtagtcccagctactcgggaggctgaggcaggagaatggcgtgaacccgggacacagagcttgcagtgagctgagatcgcgcccctgcactccagcctgggcgacagagcgagactctgtctcaaaaaaaaaaaaaaagaaaaggaaaaatatgtacatttttaatagtggtagtaagaattttctgtaactacttacgggacatcttcactgaggggtctccagagctcctaaaactcagcactcccccagtgattcttacattttcctgccagacttgctcttcttcccacaatccccaccttaatggaatcatccacatccccctggtcacctgacagttgccctctatttctttattctcctcagcctcttttaatcagccaccaagtcttgtttgtccttcctccctaatgtcactcctgttttttgccgtgaggtctgatggcactagtgctgcctggggttgctactgcctcatctcttcaacctttttgtgtcacgatgtttaggagtttctttcataaacagaatgtggctggatttaaatcaaatctgacaatctgtcttaagtaatttatgtacatttttgggatttaacttaacgtattactgtattatattttttagtactttccatgtatttccatttttgcctatttttctccttccgagtttttttttttttttttttttttttggagatggagtcttgctctgtcacccaggctggagtgcagtggtgtaatctcagctcagcgcaacctctgcctcccaggttcaagtgattctcctgcctcagcctcccaagtagctgggactacaggcacgtgccaccacacgcggctaatttgtatttttagtagagacagggtttcgccatgttggccaggctggtcttgaactcctgacctcaggtgatccacccacctcggcctcccaaagtgctgggattacaggcatgagccactgctcccggcccggaattttctttatttctatacattttacttccgttgtttttttcttttttgagacagggtctagctcttttgcctaggctgaagtgcagtggtgtgatcacagctcactgtagctttgacctcctgggctcaagcaatcctcccacctcagcctcctaagtagctgagattataggtgcacaccaccatgctcagataatttaaaaaaaaatgttttctagagatgggatgttactgtgttgcccaggctcgtcttgaactcctcactcaagccctcctcccaccttggcctccaaaagtgctgggattacaggtgtgagccaccttacctggcctttatttctgttcttactccaacattttctcatcttttctcccatccttttacttagaaaaatgttaaaattagaggaaatagtacaatgaacatgagtattctctttaatcttattcaattaatatatttctctgtatatgtatatatgcttttgtttggaatcatttgaaattaagtgtggatttgttctccatcttcttgctcaggatttggtgtgctgcttttatctgaggactcatttataaaagaaaaaacaaagaaaaagcctttttactttaaaatgattgtagataaacttagctttacacagagtttctgtattccttcacccagcttcccctaatgttaatctcttacatttaattctttcttaagttctggaaaatttcagccattgcctctttggctttctcgttttctctacagtggcctctggaatgcctcttagacatattgttgagcattttaccaccaaagtctctatatttgttctttctgtgttcctttatctgtttaatcatccaagttttcttgtgtagtttctttgagactgtcttatttctgattcttgggatgctacttctctttttgtgtctgaggcttgcccctcttggtggtttatttccttgtgtggtttgtaactttgggtgtgagttcatctccaggagggattctcttttctggctgagacttgggtcctgaattatgaaagtatacctcagagcagcttgtttgcctctggcggggccatgagtgtttcagtggtcctggctcagtttttgttcactgcttagtgcggcacccctttactaccctagtagtgtaagttcagttttatatccatgggcaggactagcttggtggcttaagaaagggtgacctcccgccgggcatggtggctcacacctgtaatcccagcactttgggaggccgaggcagggggatcatgaggtcaggagattgagaccatcctggctaacgcggtgaaaccccgtctctactaaaaatacaaaaaattagccgggtgaggtggtgggtgcctgtagtcccagctgctgggaaggctgaggcaggagaatggcatgaacccgggaggcagagcttgcagtgagctgagatcacgccactgcactgcagcccgggcgacagagtgagactctgtctcaaaaaaaaaaaaagaaagggtgacctcccacccatacctgacccacagagccttggagaagtgttcagcttcttgttgctttcctttactgggcagccctttgaggctctcttcttgatactggggctcaaagccacaggcaggctttaaaccgcttcatttgtgggtgcgaaagtccacaggccattgtggtgtcagttccactcactgtttatgtttcaattcttctcgcacataggcatttctctttccaatttggctgcatgtctacggacgtcatttgttttattttatctggtatttttctgtgatagtggtggaaaggggaagctctttcacgttaatttagtcccgtatcctactgaaagtttgttcaaatgcttagcgtgtcatatgaagcttttcatgatgcagcccattctacctctcctgcataaacttagctcttaaattttacacttcagcaaattgaactatttgcataccatgtactgtaatgtttaaaagcacaggttttagggtccagctgtttggcttggaacctgtcttttcataaggtatgattttggacaagttacttatcccttccataactcagctttctcatctgtaaaatggcagcgtccggcatgcagtaaccctgatccctgttggctgcctctgtggttgctgcccccagcagttgaggctgccaggcctctgcgcaattgcactgtttattcctttgctggaattgcctgtctcccctcctctccttgatccctcccaggagagcagcctttactccttcagagcttggggtctctgtctgtagtaactatcactctgtgggtcgctgcttgtttacgtatctttttttttttgagacagagtgttgctctgtcgccaggctggagtgcagtggtgcgatcttggctcacggcaacctctgccttctgggttcaggccattctcttgcctcagcctcccacgtagctgggactacaggcgtgcaccaccatgcccagctaatttttgtatttttagtagagacggggtttcaccctgttggccaggatggtctccatctcttgactttgtgatccgcccgcctcggcctcccaaagtgctgggattacaggcatgagctactgcgcctggccacgtatctccttttttcagccgactctgacccccttgagagcagggtcttgtttttcttggtacttgaaactccttacattctacctgtcatttggtgggcattcagtgttggtagtttaattgcattgaatttctctggctgagtagaggcaagtgctgggagtggtatgggacgcagaggcagggaatgacagcaggaaagcttgttttttggcacattttgtgccaagttgatggaaatgtgaatcagtatggctgggacacaaggtaacaattcttagtctagctgaggatgccagagacttaaaacaagccagtggccagaaaaagccactaaatcttgcaaattaaagtggtttccagacttaagaatgcatgccccacattcccttcccaaactcagcgtctctgagtgccaggtggaggaatacaaactaattataatcctagtgggccctgagaatctttaattttagaataaggctgcacttctgaaaggcgcagttgctttaggagtaggtgactctgtatgcccggggcctccgaggagaccaggatgtgaaaactcagtacctggcatttagagctgtgtcacccatcacttctgacctcgttaagatttctaccctactgcgacttaacaactaaaaagggcagatgagataggtccggggcagagcttaatggcctgtgtcattctcctcagctttgcctgaattctctggactcttgagactctatcataggaatattctcagaagagaaggcaatcgaacctttaaagatccccagattatccatcagataacagtctcatgagagtgatgaacaatgacagcaccaactctcaattcccttggctggaatttcaggaatcagcttgaactcagaggtgggcacagggttagggcttggagtaggcgtcttttctttctttttttttttttttttcttttttgagatagcgtctcactcttgttgcccaggctggagtgcaatggctcaatctctgctcactgcaacctacgcctcctggtttcaagcgattctcctgcctcagcctcccgagtagctggggttacaggcatccgccaccacgctcggctaatttttgtatttttagtagagatggggttttaccatgttgcccaggctagtctcgaactcctgaccttgtggtctgcccaccttagcctcccaaagtgctggtattacaggcatgagccaccgcgcctggcttgcagtaggcatctttgcccaacccacgtgaatcccattagttctttcttgacagctctcagtctgtggtcatatattaagcaactatgtgttcagtactgtgctgggtgctattgctgaagatacggaaatagtaatgccacaagtccctcttcttagagaggagagcttgcactctagttggagagaattcctagcacacagaaagctgcaaccagtggtgcccaacagtaatgctgtctgatgccactgcatgcaagtgtgtccctttgacaacttggtgcttttgcccaaaaggagctgttctctttctgaggcttggactattcgtttgttttttctcagatgacttgctggcactgttacagactggtctgaattaactaggactaccttttatctgtttctgaggaatagccccaaatgtgctctctcttggtctttatgaacttttcctttcttccatttctccaaattatgatagattaactttgcagtgtcatctgctaatctccaaggtcttctaggggcacgtcatcagcagttgctgcttttgaggtatcaaggtttgtcctgtggagtctcagatagtttctttacctgttcaatgaatctgattttccatttttctaggagagtgtatctcaaagtgattgctgaatcagaatgtctgggagtgtgacttggaatctattactgaagattagaggaaaatgtagcaaattgtgatctgaagcatttatggatggattgatggattgatggatagggattctgactgagttaggtagtctatagtctcagacagttgtggaagctccattaggtcatgagcaacccagactccttccaattctgtgccctgccattcttagggtgtggctgctgtcctcatggtccaaaatggttgccgtggttccacatctcacagtgagatagaagaagacagaagaatgatgtctcacctcccttctaaggagacttcagcaaagcctgcctctaccactttctgtgactgagggaaagttaattcatactcagagccaattaacctcgtgttttttttttttgtttgttttttttttttttttttttttttttttttgagacaaggtcttactttgtcgcccaggctgtagtgcagtagcacaatctcggctcactgcagcctcgacctttcgggctcaagcagggctcctccctgctcagcctcccgagtagctggaactacaggcacatgcaccacacccggctaatttttaaattttttcgtagagattgggggtcttgttatgttgcccaggttggtctggaactcctgggctcaagtgatcctcctgccctggcctcccaaagtgctgggattacaggagtgagccactgcacccaaccagttacctcatttgtaaaacaggcatggtaacacttagtgcaggagcaagaggatcagggagcacacatacatacaaagtgcttggtgctgatgcccagcctgcagcacctgttctctaaatcatagcagcaattgctgctgcagcacacttctctttctcctctctccaccgctccatctctccagggtctctaccttgcctgtcaggctccactttcctttgctcctgccttttgcatctgttcctctctgcattctcccctcatctcctctcttccgtgcacctcattttcctgctcccctcctgcctctgtccctcatcttcttttcagagacttaaaaccagccagtggccactggcttttcagtgtctcctcctcctccttgaactacctcttccttctagtgcttctgtccttccctcctcctgacctccagtgaacaataattatttgtaacgtaatgacaaattatcgttacgttacaaagaccagaggttagaggtggtgattggccttgtaaactgtaggtcagcgatgagtaatttaagaaaactaaatttaattggtttactcatgagtcagttaggaattctatttggcagctagaacagaaatagcagtggcttaaaccagtagaaattttttctattgtgaaaagaaatctagggggacagtctagggcttgtctctccgctctgccatccttagtgcagggcgtccaaccccaaggttgtatcatggtctaagatggctgcgggagccccaaccatcatgtcaggttctaggaagaaagcaggaagaagagaggaaaggcaaaaagaacacatgctccatcttaaggagctttcctgcaagtcccaccaaatagcttcagcttctcctccttgcctccattagttgcaagggaggctgagacatcatttagctgagcacattgctacctgaggtagaattgggattctgtcaccaagaaagaaggggagaatggatattgtgtaaacaattagcaaggtctgccgccattcattcaacattaatttagcacctacaatctactagttatgaagaacagtcaaggtgccccattccagagggaagacatagataagtaaacaagtacagtacacaggatgggtgaggaagagggggagagtggagaaaggcatgaagtgggtatcttacataccctccaagggcgcattctagagttcgtcatgcagacattcttgcctgtggtttgtttcctcttctgctctctcctttttgtcattgtcgccattgttgttgttggggtttgtttttgcccctccattctgacgtcagcagtagcccctagaaccttaggaaacagaaacagttggcctagtgggaagctctgggatgggagccatgtgtttgaagagccaagtcccagggccattaggcaattagaggcctgtggcaggagagcattcgttcctggacatgccgtggcactgccaggagactttactccaggaatggggtcgttgtcaggaggcatgttctaaccaggcacctggcatcacctatactgtgcttgccataaaatgaaattttggagcagtaaaattctccaggtcccgtgaaatgggtataattgtttcacccacattaatttaaccagaggtcttggtatgctatagtgttaattatgtgtaaaaatacttctacttactataaaatgtattgacagttagacattgatattccttcttagaactcaaaaattctaggaataacttgggagacccacattatctttcattttgatcccaagaacatctattgctgtttcctttgggaagttagagaggcaatgggaagcctgctgcagagattttctaaacaggcatatcccagcccctaaggagtttgaaagtgtcagagaaggctaaaggattaaaagatcgtttgttctggcacagtgcaatccttatgaggttgtactgtgaccctgggcaagttaccatcctatcctcagtttcttcatctgtcaaattttgatcctgtggaccctccccaacagggctgtgatggaaatgaagagacacatgggaagcattcagtatgtgttgttgttattatcatcattattgttatttttattattattagtgctactggtagtgctagcccactagcccactgggcagcgactgcacccgtatcagagtgtggaaagccttggatgccacattaaggagttggattttgtgggcaagggtgtgacaggtcatggctgggcttagaaatgtcactgacaggagtggagaggcagatctaggtgaggagtgggcagggcttgaacctggccagtcaaggaaaggggagaatggatacctgagtggtgagggaggacccactggtgctggagttcagcctgtgtgcccaagggatggtgtcccattgacttgggtgggaagcactagaggtggagcagttggggtggcaggaggggaaagaagcatatggtgatcagctcagcaaacaaatgggtaacttgcgcactcagtgctcggtggtgcccaggctggagtgcagtggcgtggtcccggctcgctacaacctccacctcccagccgcctgccttggcctcccaaagtgctgagattgcagcctctgcccggccgccaccccgtctgggaagtgaggagcgtctctgcttggccacccatcgtctgggatgtggggagcccctctgcctggctgcccagtctgggaggtgaggagcgtctccgaccggccgccatcccatctaggaggtgaggagcgcctctttccggccgccatcacatctaggaaggaggagcgtctctgcccggccgcccatcgtctgagatgtggggagcgcctctgccccgccgccccgtctgggatgtgaggagcacctctgcccggccacgaccccgtctgggaggtgaggagcatctctgccccgccgccccgtctgagaagtgaggagaccctctgcccggcaaccaccccgtctgagaagtgaggagaccctccacccggcagctgccccgtctgagaaatgaggagcctctccgcccggcagccaccccgtctgggaagtgaggagcgtctccgcccggcagccaccccgtccgggagggaggtggggggggtcagcccccccgccaggccagcagccccatccgggagggaggtgggggggtcagccccacgccccgccagccgccccgtcagggagggaggtgggggggtcagccccccgccaggccagccgccccgtccgggagggaggtcggggcgtcagcctcccgcccggccagccgccccgtccgggaggtgaggggcgcctctgcctggccacccctactgggaagtgaggagcccctctgcccggccagcggccccgtccgggagggaggtgggggggtcagccccccgcccggccagccgccccgtcagggagggaggtaggttcagccccccgccaggccagccgccccgtccgggagggaggtcggggcgtcagcctcccgcccggccagccgccccgtctgggaggtgaggggcgcctctgcctggctgcccctactgggaagtgaggagcccctctgccaggccagccgccccgtccgggagggaggtggcggggtcagccccccgcccggccagccgccccgtccgggagggaggtgggggggtcagccccccgcccggccagccgccccgtccgggaggtgaggggcgcctctgcccggccgcccctactgggaagtgaggagcccctctgcccggccagccgccccatccgggagggaggtgggggggtcaggccccgcccggccagccgccccgtccgggagggaggtgggggggtcagccccccgcctggccagccgccccgtctgggaggtgaggggcgcctctgcccggccgcccctactgggaagtgaggagcccctctgcccggccagccgccccatccgggagggaggtgggggggtcaggccccgcccggccagccgccccgtccgggagggaggtgggggggtcagccccccgcctggccagccgccccgtctgggaggtgaggggcgcctctgcctggccgcccctactgggaagtgaggagcccctctgccaggccagccgccccatccgggagggaggtgggggggtcagccccccgccgggccagccgccccgtccgggagggaggtgggaggggtcagccccccacccggccagccgccccgtccgggaggtgacgggcgcctctgcccggccgcccctactgggaagtgaggagcccctctgcccggccaccaccccgtctgggaggtgtgcccaacagctcattgagaacgggccaggatgacaatggcggctttgtggaatagaaaggcgggaaaggtggggaaaagattgagaaatcggatggttgccgtgtctgtgtagaaagaagtagacatgggagacttttcattttgttctgtactaagaaaacttctgccttgggatcctgttgatctgtgaccttacccccaaccctgtgctctctgaaacatgtgctgtgtccactcagggttaaacggattaagggcggtgcaagatgtgctttgttaaacagatgcttgaaggcagcatgctcgttaagagtcatcaccactccctaatctcaagtacccagggacacaaacactgcggaaggccgcagggtcctctgcctaggaaaaccagagacctttgttcacttgtttatctgctgaccttccctccactattgtcctatgaccctgccaaatccccctctgtgagaaacacccaagaattatcaataaaaaataaataaatttaaaaaaaaaaaaaaaaaaaaacaaatgggtaacttgctgcctgccagggactcctgtggcctggcatgaagataattgactgtgttttgaacgcattataaggcccctgcgaggcctccgtgtggtatttagacagtcagcaggagagaggccccggacagtggtgtgggatgcagtcccggtgtgtgaaattgccagtggttggattgtgcagcggatggattgagcagggaagccagccaagaacagaatggggtggggagggcgttgggggtaggaaaggaggatcatcatttcaagggcgggtgagggaagaacaagcagcagagtgcaaagcccccagagggaagggcgatccttatgaggttggactgtgaccctgggcaagttaccctcctgtcctcgggaggaagtggttgacagaatcattgcagcagtgagatggaagcaggaccagggcagcagccaagggcctcttagatggcggggcgagaggaggtcatccaggacctccaagagaactgtttcaaaatgggaggagaaagcagtgttcctctggtggtggttctaatgctttgtatttgtagttcttagtcgttttcaaggccctttgcattctttgcatcgtgctctcttaccacgatgcatagtgagaccccacctctacaatttttttttttttttttttttttcagtgagccaggtgtggcagtacacacctgtagtcccagctacttgggaggctgaggtggaaggattgcttgagcccaggaggttgaggctgcagtgagctgtggtcatgccactgcattccaacctgggtgacagagcgagaccccatcttaaaaacaaacaaacaaacaaatacttggttcatttggtacttggctttttggatcttggggaatattggagatgacggaataacttcaaggagactaacttcaaggtcaagactcctgccaagactccaccagacataaaataggaaaatgatgatagaatctacctcactgttggcctggcagtgggagtttgttgataaccctgaagatgaactcctcaaggtgaagagcaaggcttcagaatgggctgctctatagatgtgagagacagagacagacctagccttgcaaaaaggttgctgtagtctttctcctaccatttccagcacaggatggtttctggtcccaggaggccctgtcttgtgctgtgtgggacccttagtgctgtgaagactagcagcaccctggaggtctttgttccttctgccctttcccttagattgcatctcctaaccttggtttatatatttgtcaggaggtgggggaaacctgctttcccccacctcctgacaaatatataaactggaaattgatccagtcctggatcagtttgggtcacacaacagggtcggcagtgttggcccacagagggccctgggccccttatttcccctttggccctaggctctgagctctcaggttttggctaccaagcaaaaggtggagttgcatcagttgttgctctttaccaggcccccaggggttgctgtcggtgagctcacaggatgttttcttctctctgctttgacttgtgctgaatttctgactgaccccatgcagcatctgcgtggcttctggggcccgagcccaggtttcagcaagctgcccatggtttaccctcaggatgaactctaggaagctggggagcactgtggtggtggtataagttcagcccctcattttagtttatttttatgttaaaatgtttattaatacaaaataacacatagatcagaatgttgtatgacagaaagggactgactggactcaggatctcccaccccagccccaggggtgaaggtgaaggtgattggtttcctgggtatcgttccttccacggtttttccatgcacgctctcatgtgcgtgtgtttttatcctcatcctgctcttcaccgtggcagtggggagcacactaaattgctctgacacctagttagttttttttttgattgagtgtatcttgggaatctttccatatcagcatatacagatacactgcattctttttttttttttttttttttttgagatggagtcttgtgctgtctcccaggctagagtggaatggcacgatctctgctcactgcaacctccacctctcaggctcaagcgattctcctgcctcagcctcccaagtagctgggattacaggcacccaccaccacgcctggctcatttttgtattttgggtagagatggggtttcaccatgttggccaggctggtttcaaactcctgacctcaaatgatctgcccacctcggcctcccaaagtgctgagattacaggtgcgagccaccacacctggccattcttttttttttttttttaaagcttttttgttgtacatatgatgtatgttaggtggactgtggcttataaaacctcttcatagctgttttccagtgcgatccttctagccctgtgaggaagacagaccagaagaaattttttgcagcttaggatactctgcaaacaaggaggaagtgagaggagttggggctcatttaatgcagactaaaacaggatctttcctttgagagactgagacaggatgaggagcaggctgtagatgtgcacacatatccactcagagagaacatgagaggcagcatctgcagaggagcctggtgggcagcacgtgccgcgggggcaggaaggggagagcttccgggaaggggatggaacttgagccaaacctttttctcaaaaagaggggaggccgggtgtagtggctcacacctgtacccagcactttgggaggctgaggtgtgcagatcacttgaggtcaggagtttgagaccagcctgggcaacatagcaaaaccccatgtctattaaaattacaaaaagtagccgggcgtggtggcgcacacgtgtaatcccaactactcaggaggctgaggtgggacgatcacttgaacctgggatgcggaggttgcagtgagccgagatcgcgccactgcactccagcctgggtgacagagtgagactctgtctcaaacaaaagaggggaaggtaggaatgagacaaaggaaaaggggaggcgggcatttcaggcaggagagcagcataggcagaaggtgcaaacatgtggcagagggtcggtgtccatggacacgcttccaccacctggtctaatcattgacttatcagacatctaaatgcctgctgcgtgcccagcactgtagagggccacaaggcagcaggaacctctcagtgcctgccctctgtgggctctgactccaaccaggagaaactggacgcacaacagcaggcaaaactagctgatggtgatagaggtcagaagagtggtttacagccaggcacagtgactcacacctgtaatcccagtactttgggaggctgaggtgggaggatagcttgagcctaggaggctgaggctgcagtgagctgtgatcaggccaccactgcattccagcttggcctggacaacagagcaagaccctgtctcaaaaaaagcggagtagttacttattgtggagattagctgttcaggggcacaaagaaccttgtagggtgctggaaatgtttactgtcttgacctgggtgatgggtttttttggtttgttttttgtttgtttattttgtttttttgagatggagtcttgctcttgtgccccaggctggagtgcaatagcactatctcggctcactgcaacctccacctcctggcttcaggcaattctcctgcctcagcctctcgagtagctgggactacaggcgcctgccaccatgcccggctaatttttgtatttttagtagagacaggggtttcaccatgttggccaggctgatcttgaactcctgaccccaggtgatccgcccgcctcggccttccaaagtgctaggattacaggcgtgagccaccgcgcccagcctgggtgatggttttatggtggtatataaatgtaggaattcatggggcttattatgtttaagattaatgcagattgcatactctaaccatgagtatgttataccccaattataaatcaagcaggcaaataaatagcatattccccaaaataaagaagtaaaatgcaatagcaagaaagtgtgcaaagagctatgcctgggaaaatacaggaactgtatcattttgaaagggtgagagatgagatttcagaccctcaccctctctcactgtgtcatttctgaagggccctggtgactttctttgcccctctccactcttacagtcattggaaccagagggcagaaccccgggcctcaaaattaagtctatacaccttagaaactaggaattcaaggctagccaggtcctggccctttatctgtccttcagagagtggggtgccccagccaaagcggacagctcgccattcccagatgtgccctgtgttctcggctgcgttgcctgactcaccttggccttccctgggagtgccttttctagttttctggcccagctagaagaaagggccattacacctactccagaatcatccctgctgctcccaagttggaatatttcttcctccacagtggccacctcttatgtgccctccatcacacagtttgtatacttacctcttcaagggcaggctgtgttttactccttttgtcatctctccccataggggtctaggtcagtgcttttgtacatggtgcctgaaacagtcccataaatgatattttatttgagtggggctctctggctggagctactaggtggaatgttgccatgtgggagcaggggtcataacgaaggctggccatcaagatgctggtacttccaaattcccaacagttattaactttcaggattgaggaacaagtaatagaaattccctggaatgcccaaaatcataactttttctatatctttcctaacactttatgagtttttaaataaggagtggtcataataataaatggaattattttttctgtgataaaatttcagaggtgtttctgtaaaaaaaaaagaaagaaaagaaaaagagaaaaaaagatgtaacattaaatgcgtggtttggtggtttggttgggcacagtggctcacacctgtaatcccagcactttgagaggccaaggcaggaggatggcttgagctcaggagtttgagaccagcctgttaacagagaaagattttgtctctattaaaaataaaaaaaattagccagcatggtggcatgtgcctgtagtcccagttactcaggaggctgaggcaggaggatcactggagcccaggagtttgtggctgcagtgagctatgatagcaccactccgggtggtgacagtcttggtgacagagtgagaccccatctaaaaaattaaaataataaaaataaaataaatgcatagtttattgttattatggacaaatatattgtgatatatgattgtatatatttcattagcatgtaaaaatgatctctatctgatatagacatctgataatagaaaatgcggaagagagcattaacacaaaatgaataccaaataaaaatcacttaatgatttaagagtaatactacacatatttaatatttaaaagttactcttaaaggttaaaactagagaaaagttaaaagaataaaacaatgaatttctgtatttccttcaccaagattcaccagttgctaacagtttggcgcatttgcttgatgtgtcatagattgtccacattccatatctgttggattgtttccttgtgattagattcgggtttacgttgttggtgggaacccacatagatgaggtgtgcttcctgttgcttacatcaggaggcacagtggtgccagttggccctagtaaaagtgatgctaacttgattcacctagttaagttggcatctgtgaaggctacttttgtattaaggcagtgaacttcgaaaggaacttttccctgactttgggaattgctgacagccatttaggaaaagagacgactgttttctctgtcacgtgtagctgcagttaagaaacatcctagtatagtcagacaagctctggaagccagtatgtcaggacctgggaccaagctctacagccatctctccctgtgaccatagccaagtcatttctgagctatgtgagactgtacgtataaggaaatagacactcagagaagtgaagcagtttgcccaaagctactcagctagtgagtgacagagctaggattcaaacccatttttgtctggggacaaagccctgcccttgtccttatgccaagctgcctcctttgtgaggcagctggttgttatgattgtggcactgaccactcagatgttgtgctcggaaccaagcagaagagcaccaagccttataggccctgacaggtgagagggaagagagaggtgccttccttcatccatctggactgcccttggaattcctgggccaatttggggaaccctggcaccaaccctaacatgggccagtgccagcaccaggtatatgcagcctgtacttcccagtctgggcaggcaaaggctggaaccgcaccagcagctctcctctgtaacgcagcacggaagtatttatttcaagggtggctcagagaagtgaagcagtttgcccaaagcaaactggttcctcccctgcatgtggcaggctgtcctgcaagctgggaggcgggctgttggacgctccccagccacccttgaaataaatgcttccatgctgtgttgcagaggtgagttgctggcaccgttccagcctccgcctgcccagactgggaagtacaggctgcacatacctggcactggcccactttagggttgatgcatgggatccccagattggcccaggaattccaaggccagtccagatggatgaaggaaggtattgcctcagcctgcctgggttcctcgggggagagagggagacaggaagcattaatgggggaaaggtgtgccaagccttgccaagcaggtcattgtgggtggggagacaccgcctacgtgctcgggacgccccaggatttgggtggaggttcttgaggaggcagcgagaaaggagagctgtgacagcgactctggagcactctagaatggctcttagtgaccttctgctctggtgacccaccagcagcccaccaacctgtcatcttccagttagcagccatccccagggccagtagcacctgagcacttggtaagtagaaagacccagtgtctgctcctcatgttaccctggtgtccttccccagagcagttgttttgggaaaaactggctccggctgaagcaggaaatggtgctccttgtcaaggtcatgttgtcctgttgctatagaactgagagaccctgaggatcagccctctgaggttcctgttacctctctttacactattcatcctcataggcctccaggaagggggccaaattcagggccaggaccagggccagtggcttggtgaggcataggctttgctgtatgggccctgtggggagctctggggagttcttattcccctggctcatggccaccatcatggagagacccccagggctctggcagccaagtgggcaggagcggagggagggggcatcttgggagggagagccccgaaaggaaacagggtttatagacagactcccggtcatcactgcttgtaatgcttgctcagtgaacagtggcagtgcttttcctgactctttcaagagagtcccttctctctcctgctaggtgggctgagatccagactggttagaagcctaacatgacctggcgtgtgagaccttgcactctctgaatgtattccccaagtgtcatcaataagtcactccggttctggcatttccctatcttatcctgcatacccctcctcctggctctgagtcctgaggagtgagattgcagtttttgacccatgttcttactgagaagtgggctgtcatgcaggtataatataaaatccagaagctgctgtcagaattatgtgagaattgggaggtgacagcatgggccaattttctgaatctctagggtgctttgatgcttaagaagtctttctgggctccctgagatttgaaacctcttgttttatctgtcctttcactctggttcttcctttcctttcttggggacttcatgcttctcaaatatttgttaagtgggtgcttatatgggaccttagaaagcaaccagctaggcatgcacttggaaagggacaggaggactgagaacaagactaaacatttctgtgagattgagcagcaggagagctttgcttctttactggtgtcagtatgtgcctgcagctcctgggctgcctttactcgagtgagatccatttacaagactcctgactcttctactccactttattacaaaagatgttgatgctcgttttaaaaacaatttaaactacaaacatgaataaaggtatttatctccccaccagtccccctcattctcccttccctcctgttcttagactggtttcccctcccagtagtttaggttgtggggcaagtgtgtgtagctctgcatcagtgtcttaaacaaaatgagtgtgtcgcggatgcgcagctcggccacttcctgttttcttcggctgtatgtcacggccatcctgccatggcaccatgtctgtgccacctgctgctcttgggcatctgcagagaattccatgacatggatcttgaggtagtcttcttcagctttttctacttcatcttattttctacaatcatttatatctgcttgtaaaacctttttttaaaaaacttgcttactagacacagcacatgttcattttagaaaatgtagaaaaatcagataagcagccgggcatgatgactcatgcctgtaatctcagcactttgggaggccaaggcaggcagatcacctgaggtcaggagttcgagaccagcctggccaacatggtgaaaccccatctctactaaaaatacaaaaattatctgggtgtggtggtgcgtacctgtagtctcagttacctgggaggctgaggtgggagaatcacttgaacccaggaggtggaggttccagtgagccgagatcatgccactgtactccaacctacgtgacagagtgagaccctgtctccccgccccccccaccaaaaaaaaaaaaaatcagataagcaataaaaaaagtagaaatgacccctaagaggtaacattttggtgtgtataatacaaatgtcttttacatttgctccctcatctcagcattgccactgccattaaagaaggcacatggtcattagtcccatctcacagatagaaagcctgagccacagagagggtagcaggttgcccagaggtacacagcatagtaaagacagagctgggggtgtacctgtcatataactcagcactaatgctctctccactgtagcccacttgctgtcttcgcaccttgggacagagaggggggtgccaggcattggatttcagatgcattgaactgccttatccgaaggttaatagacagatgactgcttgaggaaagcccctgattgacttaggagaagaggtagaagacacgctcttcaggtttacagacaatatgagacaagggattgtttgcgctttagagaacagaatcgggcttagaaaaccctcaaagagctctaatgacaggtcaggagcaacaggataaactttggaaggggtggatgtaaaggggcccccttctatttccgtaagcacaggaaggcctgacttgatgttcaggcagtgatgactggtctgcctgggagtcatagtggactgtaagcagggggacatgtcatttcaacactttaacttcatcttacttcctgggagtgttaggagccacacatcaagaggacgtgatgaactaaggaagagggtttgggaacctgtcaaatgacaaatgctgcagtgacagaggtttcacctagagaagatgggtttggggaggaaaaggtgcaggccaagacttggtgaccagggccaggcaggacaggaccaggaatggcagttagttgaagggagagtctaattggtcaggatacagaacacctttttagcattagagttcaggaatagtagcgagaggcagtacagtagagtggttaagagctcctgctctgatggcttactggctcccggctcccagagtcttggaagttacctcactcttccatgttccaattttctcatctgtaaatggggataatgggtacctgccttatagtccacttgtaaaacctaagggagttactccatgaaagcagcttagaataatgcctggcacacagaggtgctgtgcactgtttgattcacacggaagctgggtaggctccatggaagaagagttgtagaaggtcttctgcatgcatttggtatgacctgcttacccagccttttccattccctgcctccctgtctccttctttctttctccatcttcctctcctgggtctaggatcctacatttcccctacctaggacaccctacccctcaatctttattttcttctttgaaactcttaagtattttatttcttcttcttcttctttttttttttagacagagtctcgctctgtcgcccaggctggagtgcagtggcacgatcttggcttactgcaagctccacctcccaggttcacgccattctcctgcctcagcctcccgagtagctgggactataggcgcccgccaccacgcctggccaattttttgtatttttagtagagacagggtgtcaccgtgttagccaggatggtctcgatctcctgacctcgtgatccacacacctcggcctcccaaagtgctgggattacaggcgtgagccaccgcgcctagccctatttcttcttctttaaattgtttttattaaaaaaaaaaaaaaaggccaggcgtggtggctcatgcctataatcccagcactttgggaggccgaggcgggcagatcatgaggtcaggagacagagaccatcctggttaacgtggtgaaatcccgtctttactaaaaatacaaaaaattagctgggcgtggtagcatgcgcctgtagtcccagctactcaggagactgaggcaggagaatcgctttaacccaggaggcagaggttgcagtgagccgagattgcaccactgcactccaacctgggcaacagagtgagactctgtctcaataaagaaaaaaatgagacagggtctttctgtgttgcccagggtggtctggaactcctgggctcaagcaatcctcccatctcaacctccctgcccagctgctgtgcccagcagtattttctataattagcatagtgtacttttcagattatcttgaagacccagctctccttgaccttgaaccttccctgaggcctccagaggcaatttcctcctcaggactcagctgcccttcactcttccctcgtgcacagcctgtcctgtgagtaggtgcaggtactgactggtcttatctttcgccctgaaaatataaacgttttaaaggcacctgaggatttgtcagcacctccccacccccaccctgggtctgacctaggactctgagtcagggaggcctccctccactgagtaatagtagccttgggatctgctcagcaagaggattgtatagtttaagggaggaagaagcaccagtgctgcctccccatgggaaaaatgaagccccccctcccgcaaccaccaccaccacagaaccaccaaccccaacgtcacttggcagattagcaaaagaactagccagacgctgctaggcccctcaggcttctagattcgctctccaccacatttctaccaatttatgctcatcttgataagctcctcctttgaagggtctggaatggtctggagtggtctggaaagcagggtcagatacccctggaaaactgaagcccgtggagcagtgatctctacaggactgcttcaaggtgcgtggtgaacagacgtctttttgcaattatgccagttgctcctctgatacttgagggttatgtgaatctaacaacagacaaaaatctctgcctcctggggcttatattctttgggaagagacaagcactaaacaaataaggaaatatatatacactctgccagatagccataagacggatggagaaagttgaagcagggaagggagatggaagtacctgagggtggactacgcatatttgaaatagggaagccagggaagacctcactgagatggccacatttgagaaaggacctgaagaaggtgaggcagtgagctgtggaggtgggtaactggggagggggaagaactttagctagagagaaaagccgctgcaaaggcccactgaaggcaggatatgcctgctgtgtcgagaccagcaggaggccgtgtgcctggtacttaatataccagaaggagtggagcaggcaggggtaccagttccagaaggacttgctggcaggtattaagatgggctttttctctgtgataggaagctccaggaaggatttgatcacaggagggacagaatctgaattgtattttagaaggatcactttgactgctgtacagagagtgggtggtgaggtgggaggcagaagccagaaagccagttaggaggctgttaagtaatccaggcaggagatggtgttggctgggaccagggtcatagcagtagaggtggtgagaagtaattagattccgtatatttattaaaggcaaagccagcaagattccttgactctaacttaaaggttggagttgtcatttactgagatgagagagaccatggggggaaggtaaagggctcggttttggatgtgttaggcttgtgctgccattggacatccgtgtggaggtgtcagagaagctggcctggagaaataaattggggaatcatcagcatactgaaggcattggaaggcacaagctggcataagatcagaaagagatggagcgtagatggagaatgaaagagacctttagagattaggaagaaaattactgactgagaccaacaaagtagattgatacggagcagccagtgatatcagagcaaaacctgggaggaagccaaatgaagagaaggcgtagaggaggagggatcgagcagtcatatcactatcacatgctatcgtgggtcaagtaaaataaagatcataagtgttaccgaaagtttcaaagtacagtgacattggccaggcgcggtggcttatgtctgtaatcccagcactttgggaggccaaggtgggtggatcacttgaggttatgagttcaagatcagcctggcccacatggtgaaaccctgactctaccaaaaaatataaaaattagccgggcgtggtgacgcatgtctgtagtcccagctatgggagtctgaggtgggagaattgcttgaatccaggaggcagaagttgcagtgagctgagatcgagccattgcactccagcctgggcaacagtgagaccctgtcccccaaaaaaaaggccgggcgtagtggctcatgcctgtaatcccagcactttgggaggccgaggtaggcggataacttgaggtgggttcaagactagcctggccaacgtggtgaaactccatctctactaaaaatacaaaaattagctgggtgtggtggcaggtgcctgtaatcccagctactctggaggctgagacaggagaatcacttgaaccggggaggcagagtttgcactgagctgagatcgtgccactatactccagcctggacgacaaagtgagactctgtctcaaaaaaaaaaaaaaaaaaaacaaaggctgggtgcagtggctcatgcctgtaattccaacactttgagatgccaaggcgggaggatcacttgtgatccgggaggagttcagttcaagaccagcctggccaacatggtgaaaacccatctctactaaaaatacaaaaattagttgggtgtggtggcatgaatctgtagtcccagctactctggaggctgaagtaggaggatcacttgagcctaggaggtggttcagtgaactgaggtcacacctgcaccccagcctagtgacagagcaagactctgtctcaaaaaaatcacctaccaccctcttcatacaggggaactttcttctattctttttctagtcattttcatgagaatcatgatctttatgtaaattcgtattgtatttttcacttatgttattaaatattctatgaaaacatgagtttaatgactaggtaatactcagttgtctgggtgtgccctaatatatttaaccattcctctattattgggcattgggccatttctgattttttgttattataaataacattgcagtgaacagctcagtgttttcctataaggggaagtatagggtcaaagaacgtgaacgcttttaggtgagacttgaacttgagatccctgggttctcctggacagaccgaccaatcacagcttaactgtgggatttttccatgtctcctctctccctgggaaggttgagaagtctctctgccctgcagatccctattcctgcctccccgctgcaattgcacgtcccatttctcctgggccagtcagagtttcattgcctctcatggggcctgctggccacccactcagtggctgcccttctccttaccaccagccttcgtcccctcacctagagcattcacaggcgagcaagagccagtcagagcttccctcagagtagggggtgtagtgataaatgaaatagccctgccttcactcatctcactgggtcgattaagtgatgtgtgatgtacctgaaagcacttcaggaacttaagagtctcatgctctaccaactgagctagccaggtgcccttaaagggctgtcctagtcttaattgtttgtaaagaaataggtagctgggcatggtggctcacacctgtaatctcagcactttgggaggctgaggcgggtggataacctgagcccaggagttcgagaccagcctgggcaacatggcaaaaccccgtctctacaaaaaatacaaaaatttgccaggcgtggtggtgcacacctgtggtcccagctactcaggaggctgaagtgggagaatcacctgatcctaggaaatcgaggctgcagtgagctgtgattgtgccactgcactctagcctgggtgacagggagatcttgtcttaaaaaaaaaaaaagaaaagaaaaaggtataagtggtggtgtccacattgtaaccacagagcccctaaagcagggctgttgacctatggttggcatcctggtcacaagagctctgtgtcagatgtgtgaggggcttgggtgtagttgtcaagcctgggaatgtggctgttagtatcgattggcctcatgccaagcagtgccaagcgccacgtctgctccccagatacctgtgtttgtatgtgtgtgtcatagtcgggaatcactgagaccaggacctctgggaggctgaaccctgggagggcagagcaggaacaggccttggagatgatctaattctgacattttactcagtgaggacacaggtggggcagccagagaggtactcagctctgagtcagggccccatccctcaactcctcagcctgagtcttcccaggaacacaacaggcagctgcttcccagaccttgcagggctccaggtggccttcccctcctgccgactcccttgccaggtttgctgtaactattgctcctccgagcctggctgaaatcatcttcagtctgttatcaccttcagtctgttctcatcttcagtctgttctccacagcagcctgaaaagtctttgtaaaaatgcagctctgttcctccccatcctcttcataacccccttggctctctgctcctcccagaataaatacccacatcctcagcttacccttcaagacgctgagtgacctctagccacagcccttctctctacccacagacagcccaggtcctcattccttgggccttttcacatcactgttcccatcaccctggaatcccactcagcctgcctgggccagaggctacgtaaggtcctcaggaaagcgtctcctggccactcgcacctgactcatgtgctctgagtgccacaccttgcttggcatttgtccttcatagccctggtcattgctggctaatgtagcctggcacatggtggtaggtacttgacaaatatttgttgaacaagtgaatgaaaccagctggcagggaccagaagggcagaggggcagggacagtgtccacaaccatagcccctgtggtcttagctgagaagggctctggctcggtctctggtgagtctctctgctggccggcagaaccaccctaccctggaagccctctccatgtagtgtgaggggtctcaggcccattcaggcttcagtaggagagatctgggtctcttctgggacctgagcaggcctttcctttacctcgttggcatctctcagcattttatttggttttaaaaatgtctcccccttcccccgaccaaccccagattataaaggtatcccacgctcactgtgaagaaattggataacataggaaaatataattaagaaaatcgaaatcacctacagctccacccctcagagaaaagtacccttaacatttgtggccatgtcttttcagttttgtttttatgcatgtgtatgtgctttgacattgctgagcttctctttgtgaaaaccacagatttttcgcagtcttcagtggctgcggtcagaggtggtcagcacgttagtgctcccagtggagaggtgatgcagggatctgggtgcccctttctccctactgcaggtgggtgggtgggcacacccaaggcccccttctgtggcagctttcctatccctggtgaagagtaccctcctgtctctggtctcttctccaggacattctccagccctggaggctgttcctagggggctgcctcttggggcaatgggaagaattgtggaatgcgtgggtggcctcctggctgtcttttctctggttccagcactctctgaacaaaaccagccccaggccactcctggggattggcctcaggtgactctctgggctgactctggccagctagaaggccacccgggcttctcctgtgtccttaagagggtggggtgacctggattggcaaatagtaagcagagaacacggcagagttgctggcctagaaaaccaggtcactaggtcagcacttggattaatgattgataagaaaggttgggagagaatcagccagacccattctcccatgacatccctcacttctgatcccaaaagcacctgccacggagacggggcaacctctgtcttgtatccagaggctgccccttattccgttgcagtatgggaggaaggaggtgacagcaactgggtcacctgcatgtggggcgagaaggggaggaaggtttaggcccttctccctgaaaaaagaagcatgtgcccagagtagggggctccctgccggttctctccccacaattgatggtgaggcagggaactgggaagttctgtctgtggaggtcccttgggtttcagcaggctagcacatttctaggactggaatatcaccatacaatcccttaacacaagccatgggtgataataatagcagcagccactgtggtccttatttgtaggacccttactatctacctggcactgttaagcagttactgcatcgttatttattccacacagcagcctctcaggttaggtggtagtattccagttttaatgtcttccccaagtcataggatgggagggatgagccagggtgtgaacccaggcctgactgaagccggtggaattcacttctttggagtattgcatctcgatggcagtaatatatgaaaactgatacagtggcaagtgctacaactcagaatagtgtggctaaggctcatgtttttagtatatttattcatccagcaaacgtatgttgaggacccactaaatgccaggcaccgtgccaggtgctgggacctacctcagtaagatacagggcattctctgggaaactgataacatggtgaggccagagcagttagcagacattgcagtttggtgtagtgattgcagatctggagggcccgggtcagggttgtggtgagaaggaacagaatggagctagtccaggagagcttcccggaagaggaggtgcagacaggtcgcgaaggagagaaggttttagctagtggaggggatggcattcaaggcaggtgccagttcaagcctccatgctcagggagtgatgtgggatcatgaggcacataggcaggcagagcaggaggataggcctggagagggaggcagggacgagagcctgtggctgtcttcagcacacaggagtcattttctggcagtaatgtccagaagggctttgaccaaggtgttcttgacagaaacagctggggactggcagccagacagaggattcagaggtgatggctccagactgagactaaggagccccagctgggcaaggacatgccagctcctggtccagtcttacccagcaccatatatgaggcacacagtagagtggctaagacttgagccaacctgccttgactcaaatcctgcttctctagttactgtgtgaccttgagccaattactttgcctctctgtgccataatttccacgtcagttaaatggagatgataatagtacctgcctcttagggttgttgtgaggattacatttgccaacatacacagagcatggtgtgtaataagtccttggagaagggaagctagtactattgtgatggaggtggtgatccagcttaggctctggtacagtaagaaggtccatcaggctgtaccatgtggcagatggagcccatggaggatggaggcccctggcacactgactgtccccactcatcccctgggtagggcagaagtgttcccacaccgtacagcctgccagtgggcatcagggaaacacctgagtcaccacgaggagtacgaggcacttgggggttgcccagctgaccaggagcacagagggctgccctgaaagtgagcccctccctactcctagcagagacggggaagggagacaactggacttggtgggaaggactgggccccaggtggcttagttgctctggccccagaccaggtctctctagagctctgggccatttgggttaagcttctaactaccactgcccatgaaattcacctgccaatgggcaatggatggagtcatgcccctccctgcacctaagttctctgaagggctgagtttcttcttggggccagacagtgggtattggaatgggagcatgggggctgcatgtgcactgcaggctttgtgtgtgtgtgtgtgtgtgtgtgtgtgtgtgtgtgtgtgtgtgtgtacacacatacatatatgtcagaattggaatagtccaggggtttgttttgcaagaaatccttttatttttattttttgagatggagtcttgctctgttgccaggctagagtgcagtggtgtgattttggctcactgcaacctctgtctccctagttcaagcgattctcttgcctcagcctcccaggtagctgggattacaggtgcgtgccaccacacccggataaccaggggttttgccatgttggccagggtagtcttgaactcctgacctcaggtgatctgcctgcctcagcctcccaaagtgctgggattataggtgtgagcccccttgcccttcccccatgccccatgcaagaaattattttgctagggactactttttggtgaggggctacattgctgcattcgtgccccctcattctggctcagggcccttgtgttgtctgggggtctgaagctccagcctcttaagtggggcaaagctgtgacatgatcagagggcttctggctctggcatagtgctggggcgtggagaggggagatagccaacactgggagccagaccaaaaaaaaaaaaagccagggttttttgccggcatacaaattaaacttagtgcctggctgtattgtggttgttgttgttgttttgagacagagtctcctctgtcacccaggctggagtgcagtggtgcgatctcggcccactgcaacctctgtctcccaggttcaggcgattctcgtgcctcagccacccacgtagctgggattacaggcgtgcgccaccatgcctggctaatttttgtatttttagtagagatggggtttcaccatgttggccaggctggtctcgaacacctgacctcaagtgatccacccaccttggcctcccaaagtgctgggattacaggcatgaaccaccgcacctggacttttttttttgtttttgagacagggtctcaatctgtcctcaggctggagtgcagcagtgcgatcttggctcactgaaacctctcccctccgggttcaagtgattctcgtgcctcagcctccgagtagctgggattacaaatgtgcaccaccgcacctatctgatttttgtgtttttagtagagacagggttttgccatgttgcccaggctggtctcgaactcctagcctcatgtgatctgcctgcctcagcctctcaaagtgctgggattacaggcatgagccatgcccagcccagcctgtgctatctttagtgccagggcttaagaaaggaagaggagaatagggttcattgcaggaattgtggtgggtggggtggcagctacctgagaaaatctagacagtgggcctaggtccagtgggtcaggggagagagcctaggggtcaaggttgctcctggctgggcaagctgagaacagggagcaaccttggctcagggtagatgacagacctcagctgtagatggagcaaggaggccatatgaaaatggcaggcttctggcaaaatgcagggatgggctgcagcacagcagttcaatctaaataggagcagcccaagggacgtgggtaggttttagaacagccaggctacagctccccttcctcttcactggtgtccttgagaggccacagtcagaagagacaattccaggctagggagagatgtcagcgtgggaactagagaccctggtcccaaattcagaactctagccagagtccagaactgcatctgagtctaagaggcaaccacttacttacacctcccgaaactgagaacagttttaccggttctggtgaaaaaaacccactaccagctcatatgtgggagtgggagctgaggctctgctgagtaacacggcccagtgcacacagctgtcagggcctggcccggctcgagtcctgctgtgtccgaagctctgccgttttctgcttcgtcctctagcatgttctgagatgccctgttgggatcctcaggcctgtcacttttgtcatctgcaaggggggcctataaggccttaatgggggctggcgaggcttgagtgggagcgtgacgcatagtgggagctcagtcagctccctcccctccctccaggatttggtcctgacagggagctccatcaggtcttccccagggtcaccagaggctcagatgctgtgttgtcaagtatatataccaggcagtattgtagcttttcctcctctgttactgcctgctaagcggggaccccacatcttcacgtcctcctcttcctggctctcatcaccacagcctggtgtgcattgccccgtgtccactgacacccacgccacatgggtccaaaaacagagtgtgttctcattgcctcatcccactcaccctgggctctgccgccactgcgctgtggctctcgggggtcccaccatctgacccttgtcacccgtgctgctccttctcttgggactcatcccttctgaggcctcccgtggccccttctcaccctcccctacctcctccatctccaggctttcaatctggtggagcataaagaatcagtgtttctggtacttgttatttggataatggcacctaatgctaaatgacgagttaatgggtgcagcacaccagcatcgcacatgtatatataggtaactaacctgcacattgtgcacatgtaccctaaaacttaaagtataataataataaaataaataaataaataaaataaaataaaataaactttgaaaaaaaagatttcagctaaaattagtttcctctccatgccgagtctgaatatattataaaaataaaagaataattgtctttcacacaattaaaaaaaaaaaaagctgactaatgccactacagtcacacactgctgttggtaattgctagggtcctttttccagtattgtggccaacttccaccccagaaccccactctactcttgagctaagtgtctttatgtctcctattttaaattaggattgcgttcagttgcatgcaacagaaatccggcaatcagtgcctggtaaaacaagtttgattttttcacctaacaagcagtctggaggccggcattgcagggtgggtccagcagctttgggaggccacagtggccaggtgctttcggacttttcacccaccctcctaccctgtcttctgctgctccgaaggcagctgctacacctctaggcatagtattcctgttccaggcaggaagatgggaggggcagaagtttgtctctctattaggaaataatagctttttcggaagctcctcctggtagatttctgttcacatattgctggtcagaattatgccaatgaacactgtagctgcaagagagcttggggaaattgagtgtttaggtaggcacagattgctgatccagagaagactgagactcagaaggaaggagaatggagctggggagaagtaggagtgactgccccagctgccacttggagaaagccacggggtgagcaggacagcacctgtgaacatttcctgtgctctgggtctggtgcttctcaagtttaacacccaggggcgagtggtcagggactgatccttgaggaactgatgtacattaaacaaactatcaagtccctgcaatgcagtgtaaatgagtaaagagcctgcaggggagaaactgccactagtggagaccatgcgagtgggcagccgattgcttggctctgggggtgggtgccagaggcatgcaggtgcccaagggccaggtctgcccaattttcaagagaagccagaaaaccaaaatttttaaaggttttttcgttctaactctattttgaaaaaagttcggtgttacagagtaagttgcagagattgtacagagtccccacatatcctttacccagctcacattaaatcttacataaaggaacactggtacaatactattaaccaaagtcagtgtgttgttcagaccttaccagtttttctgccactgccccctttctgcttcggggatctggtccaggatcccacattcatttagttgtgtctctgtggtctgctcctgtctgtgaggcttcctcagtcacaaagctagaggtttacgtgaccttttccaggttttcccactctaatgatttggaaatcatacatcggcatcttgagacatcttttgagaagtaaagggacttgagctgattgaatgttgatcactccctctcatcttccacattattaagttttgccttcttattttattataatttaaattatttttaagccaggcacagtggctcatgcctgtaattccaataccttggtaggccaaggtgggcagattgcttgagcccaggagtccaaaaccagccggggcaacatagcaaaaccttatccctaaaaaaaaatacagaaattagctggtgtggtagtgcacacctgtggtcccagctacttgggtggctgaggtgggaggatcccttgagcacgggagataaaggctgcagtgagccatgattgcgccactgcactccagcctaggcgacagagtgagactgtctcaaaaaacaataacaacaacaacaaaaaaacccatcagaaaacagctaagagttttgtggtggtgttttattttaggttcagggtacagatgcaggtttgttatgtgggtgaacttgtgtcacaggcgtttattatacagattatttcatcacccaggtactaagactagtacccgatagttattttttctgctcctctcctcctcccagcctccaccctcaagtaggccccgaggttattgttaagtccaagcaagggaaggcctggtggaaatgaatgtgtagccttaacatgttttgtacaaacttggctgtacattacaatcaccaggacaattaaaaaataagaaacccaatgtccaagctgctccccaaaccaatcaaaggagaatctctggggatgggaccaggcatctgtctttttaaaaactccccagtgactacagtgtacagccgagttggcaggtctagagcagggagagagagcagaaggagtctctgatcactccaggttctggttctgatgagtgggtagacaggcaggtgggttgctaaagtaaagattactagaggacgaatgggtttggggaaaatgatgggttctgtttggatagattgagtttgagctgtcggtaaaatatctgagagttggggtcccacagatgcttaacatcttaaagcagatcttttcttctcctgatccttccacaaggtctggtgcagacatttccccgctgggagactctccacagtacctcatgatcttatcatctctgactgtggcatttgtggataatgttttacttgctaagggttggaactgtctcctcctgggtgatgtggacgtggcatcaccacccagtaagttgtcaccttggaaagactccaggatggagcacatcttcctttttctgatgtctctgctattgaggccatggttgcagatctgctgtcaacatgagccaagaacagcagggctttatgtcttttttccacacccaaccactgaaaggatgggactcaccccttcaggaacagtagcacagcagagccgtgattcttgggcctgagtgctgatagggacagggtcggggatgggaggcgtgatgcatatctggatctccaggtgggctggagagttgggaaaagcccctcaagtcattccaatgtgcttcctggagactcagaacagaaggcagcagaggaggcagggaagggtggcacagtgatgtgtcacctctctagtttatggagcctgctccgaaccccacaaacccactacaagagccaggtgggaagggtgatagggcaggtgacttgtgatacaaggagcagagaccatggtatagcactgcaggaactagggaaggagcaggagcagaagaaccccctccatgacagcagcccccaagcgtgccccactcgcaccatcctcttccttgtcactgcctcccctgacctcttcctgtcttctcctctgcccaggctgatgggaaccaccctgtagaggtccatctgcgttcagacccagacgatgccagagctatgactgggcctgcaggtgtggcgccgaggggagatcagccatggagcagccacaggaggaagcccctgaggtccgggaagaggaggagaaagaggaagtggcagaggcagaaggagccccagagctcaatgggggaccacagcatgcacttccttccagcagctacacaggtgaggagaggactggcaggggacacggggcagaggaggcacagcccagtgcagtggggatcctggccctctgcaaacgccatcatgtggggcgcagagtagcagagtgctgaaggactggagccggaagcctgggttcacgcccagtgcggtggggatctgctctgccactcaccagcagtggggcctggagcaagctgcaccacttccttctgtaaaacaggccaaaggatggtaggtgatgtggatatgggctttcgtgagaattaaatgagtgggcatctgtaacacatgtcatcatcattattagtattcccaccactgttaacacaaggcatctgagaccaatctccactaacagcacactagaaagatcagctgtacctgggattgttatgatcagtcgaaacacacagttcaattggtctggtaataattatacacatcatcattgagccgtatcataattagataaaaatgctaagcagttagtatgaataactcaactaatattatttttatgcagccaagcagttgtagcttctcctgtctcacttattggttcccctttatttatcagcagtgcagacagttttctctagtaccctgtactgttctgtcatcttcatcatcatcatgttatgtttaccttcaaaagcacccagaatccatgcagcccctggctttccctgctgcagttccccctgcttttttgtttttgtggtttttgagacaaagtctccttctgttgcccagactagagtgcagtggcacagtctcagctcactgcaacctctgcctcctgggttcaagtgattctcctgcctcagcctcccgagtagctgggattataggcgtgcaccaccacgcccggctaatttttgtatttttttagtaaagatggggtttcaccatgttggccaggctggtctcgaaccgctgggctcaagcaatccacccacctcagcctcccaaagtgctgggattacaagcaggagccaccgcgcctggcctgatccctctgcttcttgctttctcccaccacttctctccttacccaagtgctgcaggcctgcacatgcagctcatcctcgctcctccccttagagggaactcagggtcataaggatatactgctgggagtagacaccctgcactcgctgctgctttcagctgcaggagatcctagccacaggcggtgactcaggcagaggagcaagcccaccccgcagaaatgggctctggacccctgtgactgcatggagcaggaggaggcagttagtgtccaagctaaggcagggtgaaggctgtggaggtagcgcaggctcctgtttgggtctgcagctaagatgggtctgaatcctggagccacaccaccttgaacctgcaaagcaagtcccagaattttgcagaagttcttcctcttcagtgtatagagttgggtggagggagtatagagccatcattcagtccttctcatctcacccaggatcacctgggagtgaccaaagtaggccaaatgtgattctagggccaaagtgaaggtgtccgccattccccgagtaagcaacttcctgtctattggctggtaactgggatggctttggagacacagcctgtctcagaagagaggaacagctaaccaggagtgataattcactcagtgccagtagcacatactgttctaaatctgaagaaggtagggagggttagaaagcaaagggaagacagtggggactaagaatgagtgtgggatgtcatgaggattcaggggagaatgcaaggagaagagacggccacagggtttgtggctatgccgcctgccgtggcccacctcatccccacatctgagcccaggcagatggaagtcccctgcagagcagtgttctgtcctggagtttcctccacaccccttcttgggaccagggctgtttcccaaatagcatcactgttcccgtgcaggccaggtgaggtgcctgggagcaggggtagggtgaggcaggcatggcggtgacctctcaggcagcttcgttgtgggatttagggcacagcgggaaacgtccagggcagaggttgcctcaccagtcacatggtactatgtaggcggtggtgtttaatagattctgtttatcaataagtggatgaagtggagatagacttccttgttcagtcattgaaacaggagagagggttacttgacataatcactttgtgttaaagctgtagtgtatgaaaagttcccaaaaattctacaagacaagcaacctagcaggaaaatcagaacaggtaacagtaagacaaatacgaatggcctgaaatcccgacaggtttttcagtctaaccaactcaaagaaagcaccttaagttgcaatgccatttcacctgtcagatgggtggggaggacttggtcctcccaccaccaggggtgaaagggtagtgtgggccaacacttcttaatgtgtgattctttttttttttttttgagacagagcctggctctgtcgctcaggctggagtgcagtggcacacgatctcaactcactgaaacctctgcctcccgggctcaagcgattctcctgcctcagcctcccaagtagctggaattacaggcgtgcaccaccgtgcctggctaatttttgtatttttagtagagatggggttccactgtgttggccaggctagtcacgaactcctcaggtgatcctcccgcctcggcctcccaaagtgttgggatttcaggtgtgagccaccacacctggccaagtgtgcatttcttttaccctgcattcccacttctaggaacgtgtcctgtgtaagtacttgctcagcatgctcagagattcccatgccagcttatttactgcaggactgctcataagagcaaaaataggaacgtgcccatctgtggggaactggttatgtaaactgtggtagagccatatggtggaatactctggagtcattgaaaaggataaggctggtttatatatatattaaataagttcctgacaagttggggatcccattgtttaaaatccttatgtttcatagaaggcaccggaagagtctataccgaaggactcaggggctaactctgaggagcaggatcatggttaaggaggctgtgtcataagatcctgcatacccttctgtgtttttctcaacaagtctgcactacttccataatttgaaaggcaactgtactttttttaagggtaaaattaactgtttaaaaggggggtgaggatctggcaggtgaggggccctggagacagagcctgatcatgtgtccagagcagaagggcttggagatcacagagaccagggcaggcatcccaggtctgtcactgtgagctgtagccctcgccagtgccatcacttctccaagtctcattctcttcacctttataggctgtgtcctacccagcctgagggccagccaggtgagagtcagtgggggtatgtgacacatcgcaggtctcagcacctgctagttctctgccccatccccatgagttattactttggcctcgggagtcccctgagggacccataaggacagcgcacagctttgagccctgaaacagcaggaaggctccacagtcacccctgaccaccctcctcagcagttcagcactgactctcagtgcagatattgagctcaacacctgccatgcaccttctcaccctccccccagccaggcaggacagaccttcccatcaacaaggaaactgaggttaccagaaacccacttgccagggtcccctgggcgtgtaggagtagagacagctagagccaggattcacctcccattcccattctcatccctcctgcttcagtgacatccatcccaatcacccttgagaaagaggaagataaagtgtccttcctcctggcctcagcacctcctcacttggcaagcacttggtgggcatcaggctgggcccagcactgtgcccagggctggccatacagtggtggacaaggctgagtgcctgtcccaaggagcccacagttcaggcaaacaggacagcagaagtaaagaggctgctcagtaacccagcctcaaatccctgcagaatttggcctgacttcagaagctgctgggtgcttgtttgcctgtgagctctgccagcaaagtaaatagaccaatcgggcgcctcctggctgtcttcacagccatgacaacggcattctcccagcattggaggctagatatgcaggagagctctcagccacaaatgatgtgaataaggtcaatagtgtctatttgctgaacttgtcatcaaagatggtgaaactgatactttactctctgggtgagagggctagtgtttacactgaatccaaacatttggataatgacatggtgcctcctcagcagtgactgtgtcttcttgttcatcataataatgttattgattagcggtactgaacatgtaggtatgcgtagtagtgagatgccgaggttaagagctcagctccaggaattgcatggttctaggttataattcttgctctgtcactgtattagtcagggttctccagagaaggagaacctgtgtgtgtgtgtgtgtgtgtgtgttgaaagaaagagatgtgttttaacgaattggttcacacagttgttggagtggcaagtccaaattttgaaaggcaggcaggctggagagccggggaagttgatgttgcagctcaagtccaaaggcagcctggaggcagaatttcctgttccacagtggggccacggtaggcactcagtcttttttcttaaggccttcagttgttggatgagggccactcacattatggagggtaatctgctttactcaaagtcttctgatttaaatgttaattgcatctaaaaaatatcttcttagtggccgggcacagtggctcatgcctgtaatcccagcactttgggaggccaaggtgggtggatcacctgaggtcaggaattcaagaccagcccagccaacatggtgaaaccccatctctactaaaaataccaaaaaaaactagctgggcgcctgtaatcccagctactcggggggctgaggcaggagaatcgcttgaacccgggaggcagaagttgcagtgagctgagatcgcgccattgcactccagcctggggaacaaaagcgagacttcatctcaaaaaaaaaaaaaaaaaaaaaaaaaaaaaaaaaaaacaccttcttagcacattgtttggtcaaacaactgggcaccgtggcctaatcaagttgatatgtaagaccaacatagccgctgccagcaagttactaacacttctgagccttggagcctcggcttccttgcctgtaaagtgggggtaagaagaccatcttgaaaggttgttttgaggttttacgtgagatgaaatgggtgtccaatggagtgcctttagcaggacacctgcttacccccacctctacccaggacatcatgatgcgggggaagtggtggaaccttcagaacccagcccctagtatgagaagaattctgccatcacctttctttcagcagagagggaagcagtccccttccgtgacagtcacatgcgtgagtgatggctccttccaatatcctgcacttcttactgccccttacctggcgttgctccactctgtctcatgttctagttttcttatctctttctctttttttttctattttatttttttcctgtaggcacaagtgagttacagtaggttaagttacaccttacctttccttgtttttcttgtttatttatttgtttatttatttttttgagacaaggtcttgttctgtcaccacaggctggagtacagtggtgcaatcacagctcactgcaacctggacctcccaggctcaagtcatcttcccacattcaggcaatcctcccacctcagcctcccaagtatctgggactacaggcatgtgccaccacacccagctagtttttaaaattttttatagagatagagacagggtctcactatgttgcccaggctggtctcaaactcctgggctcaagtgatcctcccgcctcagcctcccaaagtgttgggatcacaggtgtgagccactgcacctggccttttgttttttttaagtagagacagtcttgctttatcacccaggctggtatacgatggcacaatcacagctctcctaggctcaaggattttcctgcctcagcctcctcagtagctggcactataggcaggtgccacgacacccaactatttttttttttttactttttatagagacagggtctcactatgttgctcctggcctcaggtaatcctcctgccttggcctcccaaagtactgcgattactggcgtgagccaccacactcagccgagtgcaatggcgcgatctcagctcactgcagcctccgcccccctgcccccgggttcaagtgattctccttccttagcctcccgagtagctgggactacaggcatgtgccaccacgcccagctaatttttgtatttttagtagagatggggtttcaccatgttggccaggatggtttcaatctcttgacctcgtgatccgcccgcgtcggcctcccaaagtgctgggattacaggcgtgagccaccacacccagccctgctgttacctctttcttacctcagctatttgaggatagagtctaggtcctgtcctgcatatagaaggtgcttatcatgtgtcttttgagtgaacacagagggtgacattgtcacgtgcagtgccaacagaaaccaaatgactagacacctgctgaccttccatggccacagggaggatgagaaaggcacctccaggaggtgtgaataatctgagggtattggccactgtggacaagactcggtggtggaagtgagctcagagatccaaagggaacgtgagtagagacatgcagagtctcgcagaggaagcagacgtgcaggccacaaagacaaaattacaagaaatgccccaacacgagcatatgctcacggactgcacagattcaaggaggaagtgccagaaaccctgcctgccccagcatctgcacaggcatccacaaagggtttctgtcatgttatctctttttcttccaacatccggtgctgtgagttttattgtccctgttataaatgcctccaggagtggcaggtcctgcccagccccatcagccagttggtgctgcagtcaggacacccaggcagcctgaggactgccagatgtgcagagagctatcgcgtgcctgctgcgtgcccagcacctcacacagctctcagtgtctgaccacgctggtgccctggtggacaaagttcctgcccttgtggcccttttgtctagtgggtggcttccaacaatgaacacacacaggatatgtcaggcggtgacaaaggctactgagaagaccaaagcggcttcaccctcccagagcacagcttttccctcccaggcccgagagatgtagggagcccactgtcccagtctgggtcaagaggaacagttacaacaccttggaatgactgaagttgggagctaaggtgccaggacaagacaggccattttaggaaccagagacttgtgttacccctaaacctcaccagccaggaggggagcagcccactgggtcctctctgccacagttgggtgcttcttgtgctccccctcctgtggtcaggataggggaagcaggctttcctgctgccactcctaggacccaaggggaagctgggggagtggggagaccatgtgggaaggatggagtgcactttgattggtagcaggtggataggtactcccatggtggggaaatcaaagttgcttggcctgtgtagtagacaggtattaccacaggcctggaaaacattagcctgggtttatctctgtggcttcggtcccccaacatccccttctactcaaaatggctgattctctggtttggaggtttggcacctgcttttggggaggttgctcagtcattagagaagagtgcagaggttggacggtcatcatggcagaggtaggacagctggtatgtggggccatgaaaccagctttgggctaggagtcaggaagctgagactcagttcaggtcccctttccaagatgaagagatcatttccgagtgtccaaagggcactgggaagagaatcctagcagttcttatgaaatcatctgacagcagatatatcctgaagtcatagccttagcaaactgcctttctcgccaacacactcaacaccccgtggttcaaacatctatacgtctgatagaaaaacttggagaaattcagtgtgttgcttaatcaatatgactgatacctaagctgttctactcaagaagttttcatgggaatgaacttgagcttcttgaagagattgtttacagcatccctggagtctatgcaagaatagaacttcctgtgggggatggtggggaggctagctctgcagaggtctacagtcctgcagtttctgcaaaacacgttgcacacatctccatatgggccacacggtggcaacctctgaaccaggagagctgcttcctaagggctaagaccctctgtctgctttctctctcttgctttcctcccaaaacacagccatcctcctccccactgctaccccatggtgagttcagcccaggaagcctctgacccagccctgatggtaatagctgctgtgtactggacatcttctgtatgttaggctctgggagaaatgctgtggagactttttgcccatcctcccagagaagctgtcagtaccccctgttctaggtgaagaaactggtcctcagaaaggttgactccctgaggccacacagctgttaagtggctgaggcgagggctgtggggctgttcccacgccctggcttccaggcctggcagcatgtggagctgcccctccatcgtgtgtccgcagacctctcccggagctcctcgccaccctcactgctggaccaactgcagatgggctgtgacggggcctcatgcggcagcctcaacatggagtgccgggtgtgcggggacaaggcatcgggcttccactacggtgttcatgcatgtgaggggtgcaaggtacggactggggggagcggtggctggccactgaggctgtggtcacatggtgaattgaccctccacaaagctttccttgccttggggtggggccctgactgtacctattgcagaattcctgcccaggaggcagccaggcccttgtgctccagacctcagctctgggcactgcaggagaagagggggttcccttgtcaagcctaccctgctgggcacctgtgttgacccagctctgtgggtgattgtgtccccctggggaccaggcagctagggcagaatgagggtcttgggctgagccatcgtcttacctgaggtctgggtttcttgtttctcaaggctcaaagcgggctctgagaaaaaaggacagacatttgtttttccagtgatatttgtgggtccttcctaacttcacacccatcaaaatctcacagattattttattgaatcaccacctcacaaatacacagaaccagatacatttatgaagaaatcaagttagccgtgagacaatcttatgttaccaaactaacaaagaagctttttttttttttttttttttttttgagatggaatctcgatctgtcgcccaggctggagtgcagtggcgtgatctcagttaactgcaacctccacctcccgggttcaggagattctcctgcctgagcctccagagtagctgggattacaggtacatgccaccatgcctggctaatttttgtatttttagtagagatggggtttcaccacattggccaggctggtctcgaactcctgacctcaggtgatccacctgccttggcctcccaaagtgctaggattacaggtgtgaaccactgtgcctgacccaatttttgtagttttaatagggacggggtttcaccatgttggctaggctggtcttgaactcctgacctcaggtgatccacccacctcggcctcccaaagtgctgggattacaggcgtgagccactgtgtccagccccaacaaagaagctttaggacttctttagacatttaaaatagttgtgttttttttttgttttgttttgttttattttgttttgttttgttttgagatggagtttcactcttgttgtccaggctggagtgtaatggcgcgatcttggctgactgcaacctccacctcccgggttcaagcgattcccctgcctcagcctcctgagtagctgggattacaggggtgtgccactacacccagctaatttttctgtatttttagtagagacggggtttcaccatgttggccaggctggtctcaaactcctgacctcaggtgatccgcccacctcggcctctcaaagtgctgggattacaggcgtgagccactgtgcctgaactaaaatagttttaattaaagttttagaattactttccttctccatctcccctccaaaaaaatttcttctcgttacttccaaatgtcaggagtgtttacaccttatacataatcgggccctttggcacagcctccctcccacctcctggtggcctttcctcacctgttcttggtgcttcagggcttcttccgtcgtacgatccgcatgaagctggagtacgagaagtgtgagcgcagctgcaagattcagaagaagaaccgcaacaagtgccagtactgccgcttccagaagtgcctggcactgggcatgtcacacaacggtgagagctgaccagggcaactcacgggctgctggctccacacagcctgaaaccaaggtccagggagcccttggggcagcctagagggggcacctgtagagcagtgcctggcgcacagtaagcaccatggctgttggctgttggctttgctgatctggaccttggatcttagagcctaagacctgccacttcctcagactgccagcatctaccatgggtcccaggcgtggggtagtgtttacctccctatacctgaggtttacgcattctggcccagaagggaactgataattgataccagcttgaacaatttggggaacaccagtcccagaaactcaagcctgtctcagatgacctgacacagcatgaaagctactgccaaggccaggtggcccttcttggttatagaaggcaggcagtaaccagtaagtaaccacatttgtcaactgccaggagccaggcagaagtttcttggaggtcacccactcccaggagacagagccttctctgccctgtgctccaggcctcctgcagagccttgtcttcggaccccagggtaggatattgcaaagcccacctgtcccctcagtacctctctgagtaagacccctagaggacaggggagagcctcttgtgatctctacaggcaggttagctgcttggccagcttttacccagggatgccctaactgccttgcatcttagagggtagcagtacctgagccctccatttgcggctctcctgggtaatggggtctggcaggtctgggtttgactcctttcttaggaaatctcggaactgactgaatccctctccttacgctaactccaggagaagtcgaattcgtatcctactcaattactaatgacaacaatttttgagtgcttactatgtgaggattcttatttaattgatctaataactcagtaagttttaaaaagtattagcctcatttttctgattaaaaaagaaaagtggccaggtgcagtggctcacacctgtaatcccatcactttgggaggccaaggtaggaggattgcttgagtccaggagtttaagaccagcctgagcaacatagtgagacctcatctctacaaaaaaaaaaaaaaaaaaaaaaaaaatttagccaggcttggtggcgtgcacctgtagtcccagctactcagaaggctgaggcgggaggatcactttagcccaggaggtcaaggctgcagtgagccatgattgtgccactgtactccagcctggatgagagtgagaccctgtctcaaaacaaaaaaagaaaaaggctgggcatggtggcacatgcctataatcctagcactttgggaggccaaggcgagtggatcacctgaggtcagcagttcaagaccagcctggccaagatggtgaaactctgtctctactaaaaaaaaaatacaaaaattagccaggcatggtggtgggcgcctataatcccagctactcgggaggctgagacagagaattgcttgaacccgggaggcagaggttgcagtgagccgagatcgtgccactgcactccagcctgggagacagagcgagactctgtctcaaaaaaaaaaaaagaaaagaaaaagaaaagtgaaggagtctgccccaagtcacaaagctagtaaactgctgagctggaactcaagcccaggcctttgtcaccaaagtctgtcttaccccagctagcgtagctcagtcactcagtaagttagagtccttgtgtgctgggcactgtgaacaaaacagacaaaatcactgctcttgcaaagatacaccaaaaaaaaaaaaaaatcacatcttgtggagcttgcgatctggaggggccaccccatcattcctaccttgctgactctagagcttctgggggccttaggctccaaaaggatttggcccatgcacctgtaaagggatggggatgtcagaggtgctggggcctgcctgggctccttgctgactgcccccttccctgtgcagctatccgttttggtcggatgccggaggctgagaagaggaagctggtggcagggctgactgcaaacgaggggagccagtacaacccacaggtggccgacctgaaggccttctccaagcacatctacaatgcctacctgaaaaacttcaacatgaccaaaaagaaggcccgcagcatcctcaccggcaaagccagccacacggcggtgagtgttgctgctgcttggcctggcagcatcctgggctctgggtcccactgccgcctgcctgactccgggagagccaggccttctccctccctcaacttcatggtgcaggcaagggacatggggagcacagggtgggggtctcccgaggcctgatctctaacggggcctggttttcagccctttgtgatccacgacatcgagacattgtggcaggcagagaaggggctggtgtggaagcagttggtgaatggcctgcctccctacaaggagatcagcgtgcacgtcttctaccgctgccagtgcaccacagtggagaccgtgcgggagctcactgagttcgccaagagcatccccagcttcagcagcctcttcctcaacgaccaggttacccttctcaagtatggcgtgcacgaggccatcttcgccatgctggcctctatcgtcaacaaggacgggctgctggtagccaacggcagtggctttgtcacccgtgagttcctgcgcagcctccgcaaacccttcagtgatatcattgagcctaagtttgaatttgctgtcaagttcaacgccctggaacttgatgacagtgacctggccctattcattgcggccatcattctgtgtggaggtgagtgagagtggggcaggtgggctggcctggcacacccagtcgtcctgggggttggccctcactgcagggcactgtgcctgagctctgacagtgtggggaagtgtccctgtgatcttggcagtggaacatgcaaggcactgactgagcatgcaggatcagctccatctcattatgtacgtagatagaggtggagacaggaaaaagactaagccagacgtggtggctcacacctgtaatcccagcactttggcaggccgaggcgggtggatcacttgaggtcaggagttcgaaaccagcctggccaacatggtgaaaccccgtctctactaaaaatacaaaaaattagccagatgtggtggcacgcgcctgtaatcccagctacttgggaggctgagccaggagaatcgcttgaacccgagaggtggaggttgcagtgagccaaaatcccaccactgcactccagcctgggtgacagagtgagaccctgtctcaaaaaaaaggaaaaggactaacaggcagtatgctgtcatgttaatgtggggtggaaaaattgtctgcattttttctgcatttttaaaattccaacacaataaatacaataataactatgctaactaacagtggtctagagcttacttcatgccaggcactgttcttttcatcgatgatgactcacttgatcctcacaacaaccctgtgcaggaagaatgttttgtgtctccattttacacatcagagaggctgaatgacctgcctatagcctcacaggcagacacaggatttgaattaagcattgagtctcttaaccacaatactacgttgcctaatcgggggggaggtggggacaaattggcaaaaaacaaaagaagtggattaagaccaggggtagggagattagaacacccagtggagcattgctgatgggacagggcttggtctgtcacggccaaggaggcctgccgtcccctgggccaagtcacctcttggggtggaagtaggggagctccactgcctttctgagctccctggcgtgccctgtgtccccacagaccggccaggcctcatgaacgttccacgggtggaggctatccaggacaccatcctgcgtgccctcgaattccacctgcaggccaaccaccctgatgcccagtacctcttccccaagctgctgcagaagatggctgacctgcggcaactggtcaccgagcacgcccagatgatgcagcggatcaagaagaccgaaaccgagacctcgctgcaccctctgctccaggagatctacaaggacatgtactaacggcggcacccaggcctccctgcagactccaatggggccagcactggaggggcccacccacatgacttttccattgaccagcccttgagcacccggcctggagcagcagagtcccacgatcgccctcagacacatgacacccacggcctctggctccctgtgccctctctcccgcttcctccagccagctctcttcctgtctttgttgtctccctctttctcagttcctctttcttttctaattcctgttgctctgtttcttcctttctgtaggtttctctcttcccttctcccttgccctccctttctctctccaccccccacgtctgtcctcctttcttattctgtgagatgttttgtattatttcaccagcagcatagaacaggacctctgcttttgcacaccttttccccaggagcagaagagagtggggcctgccctctgccccatcattgcacctgcaggcttaggtcctcacttctgtctcctgtcttcagagcaaaagacttgagccatccaaagaaacactaagctctctgggcctgggttccagggaaggctaagcatggcctggactgactgcagccccctatagtcatggggtccctgctgcaaaggacagtgggcaggaggccccaggctgagagccagatgcctccccaagactgtcattgcccctccgatgctgaggccacccactgacccaactgatcctgctccagcagcacacctcagccccactgacacccagtgtccttccatcttcacactggtttgccaggccaatgttgctgatggccccctgcactggccgctggacggcactctcccagcttggaagtaggcagggttccctccaggtgggcccccacctcactgaagaggagcaagtctcaagagaaggaggggggattggtggttggaggaagcagcacacccaattctgcccctaggactcggggtctgagtcctggggtcaggccagggagagctcggggcaggccttccgccagcactcccactgcccccctgcccagtagcagccgcccacattgtgtcagcatccagggccagggcctggcctcacatccccctgctcctttctctagctggctccacgggagttcaggccccactccccctgaagctgcccctccagcacacacacataagcactgaaatcactttacctgcaggctccatgcacctcccttccctccctgaggcaggtgagaacccagagagaggggcctgcaggtgagcaggcagggctgggccaggtctccggggaggcaggggtcctgcaggtcctggtgggtcagcccagcacctgctcccagtgggagcttcccgggataaactgagcctgttcattctgatgtccatttgtcccaatagctctactgccctccccttcccctttactcagcccagctggccacctagaagtctccctgcacagcctctagtgtccggggaccttgtgggaccagtcccacaccgctggtccctgccctcccctgctcccaggttgaggtgcgctcacctcagagcagggccaaagcacagctgggcatgccatgtctgagcggcgcagagccctccaggcctgcaggggcaaggggctggctggagtctcagagcacagaggtaggagaactggggttcaagcccaggcttcctgggtcctgcctggtcctccctcccaaggagccattctgtgtgtgactctgggtggaagtgcccagcccctgcccctacgggcgctgcagcctcccttccatgccccaggatcactctctgctggcaggattcttcccgctccccacctacccagctgatgggggttggggtgcttcctttcaggccaaggctatgaagggacagctgctgggacccacctccccctccccggccacatgccgcgtccctgccccgacccgggtctggtgctgaggatacagctcttctcagtgtctgaacaatctccaaaattgaaatgtatatttttgctaggagccccagcttcctgtgtttttaatataaatagtgtacacagactgacgaaactttaaataaatgggaattaaatatttaagagctgactggaa

SEQ ID NO: 35 - RNA, 3749 nt, Homo sapiens
gcggagcgugugacgcugcggccgccgcggaccuggggauuaaugggaaaaguuuuggcaggagcgggagaauucugcggagccugcgggacggcggcgguggcgccguaggcagccgggacaguguuguacaguguuuugggcaugcacgugauacucacacaguggcuucugcucaccaacagaugaagacagaugcaccaacgaggcugaugggaaccacccuguagagguccaucugcguucagacccagacgaugccagagcuaugacugggccugcagguguggcgccgaggggagaucagccauggagcagccacaggaggaagccccugagguccgggaagaggaggagaaagaggaaguggcagaggcagaaggagccccagagcucaaugggggaccacagcaugcacuuccuuccagcagcuacacagaccucucccggagcuccucgccacccucacugcuggaccaacugcagaugggcugugacggggccucaugcggcagccucaacauggagugccgggugugcggggacaaggcaucgggcuuccacuacgguguucaugcaugugaggggugcaagggcuucuuccgucguacgauccgcaugaagcuggaguacgagaagugugagcgcagcugcaagauucagaagaagaaccgcaacaagugccaguacugccgcuuccagaagugccuggcacugggcaugucacacaacgcuauccguuuuggucggaugccggaggcugagaagaggaagcugguggcagggcugacugcaaacgaggggagccaguacaacccacagguggccgaccugaaggccuucuccaagcacaucuacaaugccuaccugaaaaacuucaacaugaccaaaaagaaggcccgcagcauccucaccggcaaagccagccacacggcgcccuuugugauccacgacaucgagacauuguggcaggcagagaaggggcugguguggaagcaguuggugaauggccugccucccuacaaggagaucagcgugcacgucuucuaccgcugccagugcaccacaguggagaccgugcgggagcucacugaguucgccaagagcauccccagcuucagcagccucuuccucaacgaccagguuacccuucucaaguauggcgugcacgaggccaucuucgccaugcuggccucuaucgucaacaaggacgggcugcugguagccaacggcaguggcuuugucacccgugaguuccugcgcagccuccgcaaacccuucagugauaucauugagccuaaguuugaauuugcugucaaguucaacgcccuggaacuugaugacagugaccuggcccuauucauugcggccaucauucuguguggagaccggccaggccucaugaacguuccacggguggaggcuauccaggacaccauccugcgugcccucgaauuccaccugcaggccaaccacccugaugcccaguaccucuuccccaagcugcugcagaagauggcugaccugcggcaacuggucaccgagcacgcccagaugaugcagcggaucaagaagaccgaaaccgagaccucgcugcacccucugcuccaggagaucuacaaggacauguacuaacggcggcacccaggccucccugcagacuccaauggggccagcacuggaggggcccacccacaugacuuuuccauugaccagcccuugagcacccggccuggagcagcagagucccacgaucgcccucagacacaugacacccacggccucuggcucccugugcccucucucccgcuuccuccagccagcucucuuccugucuuuguugucucccucuuucucaguuccucuuucuuuucuaauuccuguugcucuguuucuuccuuucuguagguuucucucuucccuucucccuugcccucccuuucucucuccaccccccacgucuguccuccuuucuuauucugugagauguuuuguauuauuucaccagcagcauagaacaggaccucugcuuuugcacaccuuuuccccaggagcagaagagaguggggccugcccucugccccaucauugcaccugcaggcuuagguccucacuucugucuccugucuucagagcaaaagacuugagccauccaaagaaacacuaagcucucugggccuggguuccagggaaggcuaagcauggccuggacugacugcagcccccuauagucauggggucccugcugcaaaggacagugggcaggaggccccaggcugagagccagaugccuccccaagacugucauugccccuccgaugcugaggccacccacugacccaacugauccugcuccagcagcacaccucagccccacugacacccaguguccuuccaucuucacacugguuugccaggccaauguugcugauggcccccugcacuggccgcuggacggcacucucccagcuuggaaguaggcaggguucccuccaggugggcccccaccucacugaagaggagcaagucucaagagaaggaggggggauuggugguuggaggaagcagcacacccaauucugccccuaggacucggggucugaguccuggggucaggccagggagagcucggggcaggccuuccgccagcacucccacugccccccugcccaguagcagccgcccacauugugucagcauccagggccagggccuggccucacaucccccugcuccuuucucuagcuggcuccacgggaguucaggccccacucccccugaagcugccccuccagcacacacacauaagcacugaaaucacuuuaccugcaggcuccaugcaccucccuucccucccugaggcaggugagaacccagagagaggggccugcaggugagcaggcagggcugggccaggucuccggggaggcagggguccugcagguccuggugggucagcccagcaccugcucccagugggagcuucccgggauaaacugagccuguucauucugauguccauuugucccaauagcucuacugcccuccccuuccccuuuacucagcccagcuggccaccuagaagucucccugcacagccucuaguguccggggaccuugugggaccagucccacaccgcuggucccugcccuccccugcucccagguugaggugcgcucaccucagagcagggccaaagcacagcugggcaugccaugucugagcggcgcagagcccuccaggccugcaggggcaaggggcuggcuggagucucagagcacagagguaggagaacugggguucaagcccaggcuuccuggguccugccugguccucccucccaaggagccauucugugugugacucuggguggaagugcccagccccugccccuacgggcgcugcagccucccuuccaugccccaggaucacucucugcuggcaggauucuucccgcuccccaccuacccagcugauggggguuggggugcuuccuuucaggccaaggcuaugaagggacagcugcugggacccaccucccccuccccggccacaugccgcgucccugccccgacccgggucuggugcugaggauacagcucuucucagugucugaacaaucuccaaaauugaaauguauauuuuugcuaggagccccagcuuccuguguuuuuaauauaaauaguguacacagacugacgaaacuuuaaauaaaugggaauuaaauauuuaagagcugacuggaaaa

SEQ ID NO: 36 - protein, 441 aa, Homo sapiens
MEQPQEEAPEVREEEEKEEVAEAEGAPELNGGPQHALPSSSYTDLSRSSSPPSLLDQLQMGCDGASCGSLNMECRVCGDKASGFHYGVHACEGCKGFFRRTIRMKLEYEKCERSCKIQKKNRNKCQYCRFQKCLALGMSHNAIRFGRMPEAEKRKLVAGLTANEGSQYNPQVADLKAFSKHIYNAYLKNFNMTKKKARSILTGKASHTAPFVIHDIETLWQAEKGLVWKQLVNGLPPYKEISVHVFYRCQCTTVETVRELTEFAKSIPSFSSLFLNDQVTLLKYGVHEAIFAMLASIVNKDGLLVANGSGFVTREFLRSLRKPFSDIIEPKFEFAVKFNALELDDSDLALFIAAIILCGDRPGLMNVPRVEAIQDTILRALEFHLQANHPDAQYLFPKLLQKMADLRQLVTEHAQMMQRIKKTETETSLHPLLQEIYKDMY

SEQ ID NO: 37 - DNA, 28175 bp, Homo sapiens
agtgggcgtggcggtgctgcccaggtgagccaccgctgcttctgcccagacacggtcgcctccacatccaggtctttgtgctcctcgcttgcctgttccttttccacgcattttccaggataactgtgactccaggtaagcaaggtggggtagcagggctggtgacttccttttttcagggaaattcataaatatcgttatttgagctgatttgagatggtgaacaaaatggacttaggtccattttggggctgttttcaaagacgggctgttgggttgagtactgtcgcctctcatcccccatgttggcagtatttccagctcccaaccctttgagcaccaggaacactgcagagggagtaaaatcacttaaccatacaaggtaagaatatgaagaagtcacgtggctcggaggttttggtggtagaggggtgcaaccgtgattcacggaggagaaaatacttctgaggacattttcaggcctactttggaactcagaatgaattttgcaatgctagtttcagaaagggtgtggtacccgcaaactggggaaagttgagaagtattggtgggtctggctggctcttctccctggctgacgttgtaaggctgagatttaggcatatggactgcccttctttttggcatttttaagcatcagatcgctgttcatctacttgcaactgcattcttctaagcggaaattattctcccttcagttttctgggtttcagcataactttaaacaagttacacatttcagatgcatattcttggacttataaattgtaatagctgcttgtagtttcttactcatatgctgtacactttttcttatggcttcatttaagcatatcatactaaaaaccaacatgccaggctattccagagacttgtaaccagatcctcagagctgggggctcttagacatatttcagcccagccccctcattctgtagatgaggagcagaactcacagaggtgatctggtgtccaaaggcacacagcttgtaagtagcaccgctgagatcaaatcaggccttcacacttgcagctcgggatgtttccacaacaccgtgggttctgttaccatctttttcatcccctacatctcccgggaggttttcgataatgggttccaaacctcagtccctgtcagttagtgtaagtgttcgatgagttccttcatgggtggagatgaagcctgtctgaggaaaggagtctccaaaggaaatgagtcagcaggtttatatctttgcttcctaacgccttgaattgtgccacttcaatccctctgggttgtggattgactttggggctatgcagtctcagcgatttgggccattctggtgtggctgagtctggctgtaagtttactgcttggcaacagtgggctgggtcagtggtcaagatcaggcttctaaagagacaggagcagctatgatgcttcagagcaaagcagacgcccccctgccatgggaaattaaagcaattactaatagctgtattgtactttcttgcccacaaagcacttttcatatacattgattcacttaatcacttcgtttagtcctcatagtctttcacattgcagaaacttcaaaatatcctattttcttaatcctgcacatcctttgctcctcaaagacttagaatgtggacaacagaggttgtgttttttggcattccattactgatattataataggcaaggtttctcatggcattccctaaggactggttataccaaatacttgagagatgtttttcaccatgtctttccatctttaaaatgaggcaggccaggctaaatgatatctacgatactctgacacagtaaaaacgtagttttttttttttttttcttgagatggagtcttgctttgtcacccaggatggagtgcagtggcacgatcttggctcaccgcaacctcaccctcccaggttcaagtgatttttctgtctcagcctcccaagtagctgggatgacaggcacgtgccaccacgcccggctaatttctatatttttggtagacacagggtttcaccatgttggccaggctggtctcgaactcctgacctcaagtgatctgcccgccttggcctcccaaagtgctgggattacaggtgtgagccactgtacccggccaaaagttaaggttttaagggatgaaaaaactatactcatagctctgtttaaatatgcacgcccgtgatgtgtgggtgaagagtgtggttgatggtctataagtaaaatgaacatatattgttcaaatcaggatatgtttgagagtaaacggggcactgttatcaatgtcaagacaacagacataaaccaggattgtcccaggcaaagtgggatgtatatatcctacccacaggacttttttctcacctaaatggtctaaagacaaaaaatgtgaggaccattggctcagatgcataaaaaacttaggaaatcttcatacaaagaccagtgacaagctataagtctagagaagtgagcacggccctacccccagcccagtacatgcgtctccattcactggggcctctctgaattgagtcagttctccctgtcccacgtttttgcaaggctaactcctacttatcctgtaggactcacctttaatgtgacttactcagttgtcactgtctctgaggaggtgtcactgaggtttctagtatggggggtctgtcactcctggggatcccatagtgacttgggtgctcatcaaaacacttaaaacagtcatcataccactaactgacagctccttggaggcaggggctatgtcgttttcaccttttcttaatgcttaccctgacacaaattaggtactcagttaatacttactagatgaaagcaacatcataccaagagtttacaacataagtggcagaaagggaacaagggcttcttcaagtaggaaaatcatagggaagaagttttgtgtcgattgaacaaaccatgcaggatatgttgatatcttcaaggggagacttcaggacatgcaggatttttggaactcgagagacttctgagagaacaaatgccagcaaagatgcaattaacaagaaagcaggtgatcaggtgtggcggggaagtgccaggctgggagctagaagcaatgaattctaggtctggttttgccactctcactccctgcgtgggtggcctgggagactcacttcatctttgtctgcctcattttcctcatctgtaaaatgaagaggtgtggccagcctagatcctctccaagatcttgtcccactttcaaggtttataatttgcacagattgcgaaagcaaggtacttggaaataagttcttaaaactgcatttgtattactgcttgaacttccatctatctcactttcctatggttaaaataaagttccttttaaacttttaagtgctgaaagatgtagcgttttctacattgcaactataaacgaagttctccttgttaaaatggttacagggttttcacagaaatggaagaagacccttgtgacaaggcaacagaatgaaaaaaaatttgtagcaattttagcactttcaacagaagtcattaggcacattaaatttattatataggaattgctaatctctactctggtacttgcaattttatagcatttgatcatgcaaaatggtctgtgtaggaagtttgtattttttccaggtcatgtattgttaacattgctgaggtttgtttaaatgctttgattgtcttgcaacacagtcatgtggcaactgtggccaaagtcatcttttgagctacctcagaccagatcaactttatagtgtttttaggtcacttgggactaatcacagagccactgatcagatttaccgggcagtatttgattgattacttagtgggtgattttttgcaactacaaccttttccatgtacagaccttttctgtttcctttagccagcatcaaacaatgctcttgccactgggaccccagatactaagggctgtatgaccttcccagacatgaaggagaattttctgagaaaggagccagtcagcataggaacaggaaggcagatctctttgcgttcatgcactgaggattagcatgcaaaggaagggactcactcaaagggaaggtccgccaatggtgagagaaagccccagagatgttaggatgtcagatgtgcactgatttacatctccaacagggacctggatctaagccttgaattgcaacacagcattaattgtattgtgtaattaactacactaaaagccacaatgatcttgtatccacaatcatttagactaaatgtatctcaaaatgttgtgacaagtgaatgaataatgctttagtgaaataaaatggtaaaatgaacatctcctcaccatttgatccactcctaagatccatttgtaggtgtttgcagccaaactccctcagcacattaagatcttaaacaccatctttctatacaaaggaaatcactaaaagtatagtttgttattgactatgcaaaattattctagtttctcttggaggataataaatacgtgcttggaggagctacttgtgtttgttaaagcagtttgtgtgttttcatattattatcagtgcgattagctctccactggtggaagtgttaagaagctttcagggatctgggtttaggcttctctatttggtgaagaaataactcattacttcttgtacatgttgagttttacttgtagatgaacttggcattactaatattaaatgtgctgtggaaggaagccaggtttcctattctgaaagtctgtccacagattccccaaaccttttgtgaagagtttctttatgttttcccagtggcaggcacactgggtgaaacactcaacaggctttcatttttgcctcagtataccctgctgacctcagtatacacctaatgccagtcacctttccctggggtgtgatgtcacctgtaggcccttgcccctgccctgaggggagaaggagtaaggttgtgggctttaaagaaaagtgagaggcccacctgacttcagggggcctcgtggtatatttgcaatgggaactggcctgagcgcatggctgtacttatcagggacatatggagaaggaggaagcccatggaaatgaccagtgagcatgaacagagtcaataaaacattatttttggataatgaactcgctttttcagactctgagatataatcgatttaagtccatcctacacacaagccatatatcccataaaagggagaattctgaagaaatgtttaaagaccaggagtcctctcctccatcttattctcgtctttgcattctgaatttgtgtccaggtataaggtgcaaattgcaatcctattcatcatgcctttgactcttgacacacgtttgggtactggccaaagggagtcctctatcttaagcagtggagcttactttctaatgccagggtgcatgtcctacctgaagaccttcaatgtcacattcggcccttgtgtctgtgtgtgtgcgcctgaggctttgggggaacacttcgagtttaatccctgtactgctcaccccggggtagtaatatcaattcatttcccttagaaacatgctgtcctggcttaggcagaacctcaggagttcatgtagttcagctctgctcccagaaagggaagccctgactgcctgaatttacctaattgtctttggagtcgatcagtaactaccagactaaataggtaggtagacctttattagaacagtgaagctttttaaatctgaggaccctgttacactcttaaaaattaccgaggaccccaaagaactgtttctttaaaaaaaatgtagattatatctatcactatttaccaaactagaaatgaaaaccagacacattttgaaatgttcatttactaatttattaaaataatataataattaaatactaatatgaataatatatatattaaaaaacattttctaaagtgaaaaaatgtaatgagaagagtgatattgtttttcatttttgcaaatctccttaatatttggcttaatagaagggatgtcatatagcctctggaaaactccgctgtctattagagattgagaatgataatgtcttagtattatcatgagaatagttttaacctcatggacctcctgaaagggtgttagggactgccaggagtcaagacacaacactttggaagttgctgtgttaaaattaaagagctctgagatgtgacaagatgcctagttgctgctatatccactttaccaggctacatattttgaaactgttccctcttttctttaactcccatattacttattataccactcacatgtcttgggcagctctgtattctagttatttgtctgcatatctgcccaaagagactatgagcttagagaaggaggaggtccactgatccttgtaacactctgggtagtgtcttacacacagatgcgtattataaacgcaaacaataaccgctgctgtttattaagtattgttatgtgctgggtgtcctgcaaaggcattagttactttaagggttttctagcacttctcacaaagcaccacaaaccaggcagcttaaagcaacagaagctttattcacccacaggcttggaggccagtactttgaaatgacgatgtcggcagggtcatgctgtctcaaaaggctccaggggagaatgttccatgactttctcttggtttctggtgttgccagcagttcttagcattctttggcttgtggaagcatccctccaatctctgcctccattgccatacggcatgcccttcacacaggtgaagacatttgtgtcttcacatcttccctctgtgtatgtctgtttctgtgtctctcctcttattcctttaaggacaccagtcatatcggattagggctcacctaactccaatgtaacttcatcttaactaattatatattagttaagaaataggacataccctgtttccacgtaaggtcacattcacaggtaatggggattaggacttaacatatctttttgggggacacaattcaacccattacacttactaaatattaaactgaacaatgcaaaactgctgcaattcgactgtttttgttttataaaagttttaactttgtagtttaactgaaatcctaatggaaacaatatgtgataaataaaaccaactgatgttgattagtgctgtcaacttttctgacatatgctggagaagagatgtgaccactgggctcccgacaatggccactgtggctgagcaggcccaagactgcagagtctaggcagagctggacacacagaggacctcacatgccttcagacatttgcctggaagtttcttcacaactgatcttacttttgaatttacagaaagttccttgtttcttctgagatcaattactttgtttaaatagaattcttatagtgttggcagaatgcagttgagaagacgttaaagatgctttagaaactaactgctcccttgtccttgcttccaggcccgcaatggatgccctgcaactagcaaattcggcttttgccgttgatctgttcaaacaactatgtgaaaaggagccactgggcaatgtcctcttctctccaatctgtctctccacctctctgtcacttgctcaagtgggtgctaaaggtgacactgcaaatgaaattggacaggtaagccccaaaaccttgtttctactttaagtgggaatacagttattagaacccataggcagtgcctacggaaaaaaggaatgtagactttgtggccagaattggtcaagattcagaactgtgccattccaggactctcttaatcttttttttttttttttttttttgtgagacagggtcccactctgtcacccatgctggagtgcagtggtgcgatgttggctcactgcagcctccaggttcaagcgattgttgtgcctcagcctgccgagtagctgggatgacaggcgcgtgccacaacgccaggcaaatttttgtatttttagtagagacagggtttcaccatgtggccaggctggtctcgaactcctgacttcaggtgatccgcctgcctcggcctcccaaaatgctgggattacaggcatcttaatttatttttaaatgtgaaagctcgcttgtaggtaatgcaactcacatctgggacaggcaccaggctgtgatggagaacctggagatctgctgggtaatcacagctttttcattctgacttataatattttcaatttacaatggttttattgagatgtaacctcatcataaatcaagcagcatctgtatcgttttagggtttctttctggctatggttgattatctagctttgtaaagttcttagaccttcaaatgagacaattttcctgattgttccgttttaagtcctcatgtacttttacataataggtgaatgttcttctaattctatttcattattactcttatgctaatcattctaggttcaatagaatttcttttctattagctcataagcatttaaaaaggcaacaccttcttgtattcatatgtgtccagaaagtatggcccataagagttatttaggtaaggatgaagaatttacacttgggacttgaagcagcttcactcctgtgaagaggagatgtatcttgacatcaagccacatctctgaactgcgcaactccactatccctacccaatctcccattcctcatttctcatctaccattagagaaaggccagcgaaagagaacttccgggtagtgggtctgttcctcagtaattcctcaagctcttctcagtatatgcaactggttccccagcagtagttacctgggctcttaaattttctggtctccttcatccatctttaggcatgagagttatgcactgtctgggaccagcatttgaccctgcaatgctgaggctatgtaattcattgggacaatgtgccggtttggcagcgttcgttatctgggttgtggaatcacagcatggccattatgagttatggagcgaggagggtgtcatcttatgctgacattacatgttgtggtgttgcaaggcagaaaagatgctggactattggttggaacaataaaaaaaaaaaaggaaaaaaatacaatgatttaagccctccaaatgatagtatcctggttttaaatggcttacaatattattacaagaataattaacagtttgaatccatataatattttacgtgttttacatataagtaatcctcattaacaactcaggaaagcaggtattttcagcccattttacggagaggaaaggaggctctgaagagttggagaagattctctgaagagttggagaagaggtggtgaaggctgggattcacaggcagggccatctgactctagccagcccagggcagcccaccatttattgtagctgcccatcagaaatgacacatctatttacctggcatttgctaaagcacccagagggactagacagactctggctagaggcacttgtcctgaaatctgattcctgcctgatgatggtgtctcttgtatcaatctctctctctggtctttgaattggatagaaattataacccagcttcatcgttctccaagtttggaaatccttctgtgtgagtattaagggcatcactttgaagaaaggacaaatgttctcgatggttgatttggaagagtacctttatggtagtgtttctcagtggggacaatttgtcctccccttcccactctgggataatctggcaatgtctggagacattctgggttctcacaaataggaggaggatgccactggcatctagtaggtcagcgatgctgctaagcatcctgcagtgcccaggacagccccacaaagactcatccagcctgaatgtcaatagtgctgaggttgaggagccttactttacgggaactaggcaggaggagtctgtatgcccaaggacgttggtcattatcacgtgtccacttcagtacagcactactcagaggcaatgctttttgggtaacggatttttctcttaacaggttcttcattttgaaaatgtcaaagatgtaccctttggatttcaaacagtaacatcggatgtaaacaaacttagttccttttactcactgaaactaatcaagcggctctacgtagacaaatctctgaatctttctacagtaagttgtttaaagcaagtagcaagacttaactttttacaaggagtggcattttcatgctgttagacctacaactttttttcagtgaaattcctttctaggatgttcacttgtgatttgaggctttaaataaataaatcctagtggagaggttgagtatagtgggaatcaattgcagtcacatcttctaactcaaaatacagagaagcttatgggctttccttttctctctcaaataaatcttaccctttcttttaccttcctctgagagaatggagaacagagtaattaactctctaataaatgtagctccatagacaatgagctgtcttacagagtgtaagacagctaatgatttaaacttctttctccttaaagagcagggcatatggcctgggacaatgttttaagctctccacctcattttttatgcacacattcttctgatgtttctcaaaatcagtaagaaaaataataactatgaattcacaattttcatcagtcacaaattagttttgttggctgggctggtcagatggggatctccacaggcagctctggttatataagtttagccattgctctaaggaatcatacaaacaccactacggtacccattgttgtaatatttaaaaatctgtatttgaaacacacagacaatattctagactacatgaagtttccctctgtacttcagtaacacagagttgatttagttcctgtttggatggtcagaatttcaaggtttccaaatcgaaaagctagactaccagcttttaaatattttaccatgattttgcaactttctgcagtaggtatttttgtggttaagatcttttgaggacatgggttactagatattgtgagtatattttttgttgcttaaagatacatacacacaaccatttttcttccaacaatcatctgaagaatttaaaaaaaaaaactgagatgtgagttgaagcctgagcatacaacatttctagaagctccctaaatgatcattaaagagacaattaacacatttttattgctggcagtgaggacaatggaggccctccttcatctggctgaggctttctaatgttttcaggtgagattggttctgtcagtcaatggtgacagtgagtcccaaggttgatttgcaattaactgaagctaagttaattggctaaggctgaagctgctctgaagaaattcaagaagccctgtgcttggaagtgaactgacatgacactgaatcaagttatatttagtttcactgaacttccatgcaacatctggaatgatcttaaccagactaggagttgtaaagttttgttttgtttttttccttggagatggagtctttctctgttgcccaggctggggtgcagcggcatgatctcggctcattacaaaagattttttaaaagactgctttccattgctcctgctaggtgcacagcatctgcaaatttactagttaaaggtccaaacaagtgtgctctgtggaggatctcttgcataagaactatctgggtgttaaaagggcaagttcttcaggcccttttaacacccaggtagttctgattgaacccaggtagttctgattaaacccaggtagttctgattgtcaaggtgggaatggggtttagggttgcacattttaaataagcattagaataagaactcctgttatgttctctcctgcattgtgtttccaaccttaatttgcagatggcacacctggaaattttgttaaaatgcattctgattcagtatgtctggggtggggtctgagattctttatttctaacaaggtctcaggtgatgctgtacaccaccttggaccacagtttgagtagcaagggtctacaggatatttagttcagcaaagacaagagttttctgctcataattctgttttctatacatttcctatattctaatatatatgtatctgtagacatacaaaattttcatgtttctgaaattacaacccataagagaattgggcatatttaacatagtgttttccccaaagctgatattaaattgatagatgcatttaataattgaaattgtcttataattgaaaaaaatgaaacattcaatacaaagaaattcactgacttctacatgaggtttcaattcatatagtgttaccaattttgaaagtgtacatatagcagttgatatttaataatccttttgttagaagagaataacaatgcaatagcttgactacagactctgattttatgaactgcatgtttttcaggagttcatcagctctacgaagagaccgtatgcaaaggaattggaaactgttgacttcaaagataaattggaagaaacgaaaggtcagatcaacaactcaattaaggatctcacagatggcaagtaccctttaattgttctgctatcaatcaccaagtaaacagggccttccatctcataaatgtttgctccaaggataaaaaaaacatctggaggattctctggatatttttactacacaagctaaattctttcccttcaagcctgtaaacaacttggatttctgggcaattcttgtatcatctcatcacttggtagaaactgttgatgcttcagtgttagtttactttgtcttgctctctgacgagctgtcacaggccctagtggaatcctagctgcgcctctaacaaagtatgactttgggccaatcatgaggccatttttcagtctggaaatagagggactggattataacttcatgatccccgaggcccctttcagctgacaaattttacaaatttgttaaggaaaaagggacataggcaacatatgtaaaagaaaaaccggctggacgcggtggctcacgcctgtaatcccagcactttgggaggccaaggcgggcggatcacgaggtcaggagatcgagaccatcctggctaacacggtgaaaccctgtctctactaaaaatacaaaaaattagccgggcgtggtggcgggcgcctgtagtcccagctactcgggaggctgagacaggagaatggcgtgaacccgggaggcggagcttgcagtgagcagagatcgcgccactgcactccagcctgggcgacagagtgagactctgtcttaaaaaaagaaaaccaaaccaaacaaaaccgtagtgtcagcttgtcctcggtgccgcagctccccatgctggtcgttcctctgatagccccggggtccaagaagctcctaggttctttctccggctcagtgcttcccccaggcgtctccctcgtcggactcctcgtccctcccttaaaattgccggtgagtcgtcttccttgctggaaaagaattagggttatgatgattttgagggcaaatcagtgactttgtccccctccccagtggatatatttataattgcatctggagggacccgttgggaggccgggccgaatctagtcatgaaagaatgaagcctaggcagtcgctgctgtctagggagggatacacttccggggcaagggagacccacttcctgcgagaatgactggcgcccccagctactctgtctctgtactgactgaggaagttctaacaggacagtaactgcaggatgagaacatgggaagaacagggtctctggagtcattcagcacctaggttcaaatccagacactggtacttactaactgatatttggacacaaagcttcaatttactgaactgtaaaatgaggcacatgttacctgatttaatttttaaaattgtattatattgtgttttatttcaataggttttggggaacaggtggtttttggttacatggataagctctttagtggttacttctgagattttggtgtacccatcacccaagcagtgtacactgtgtgcaatgtgtagtcttctatctctcacctccttccactcttcccccaccccacaaagtccattatgtcattattatgcctttgcatcctcatagcttagctcccacttataagtgagaacatacaatgtttggttttccattcctaagttacttcacttagaataatggtcttcagaccaggcatggtggctcatgccataatcccagcactttgggaggccaaggcagctggatcacctgaggtcaggagctcaggaccagtctggccaacatggtgaaaccccgtctctactaaaaatacaaaaatcagctgggcatggtgtcacgcacctgtagtcccagctacttgggaggctgaggcaggataatcgcttgaacctgggaggcggaggttgcaatgagctgagatcgcgccattgcactccagcctgggtgagaagagagaaactgcgtctcccaaaaaaaaaaaaaaaaaaaaaaaagaataatggtcttcagctccatctaggttgctgtgaatgccattctttctttcattttttttttgagatagaatgttgctctgtcgcccaggctggagtgcagcggcacgatcttggcttactgtaacctccgcctcccaggttcaagggattctcctgtctcagcctcccaagtagctggggctacaggtgcgtgccactacgcccagctaatctttgtatttttagtagagatggggtttcaccatgttggccaggctggtctcaaactcctgacctcaggtgatccacccgcctcagcctcccaaagtgctgggattacaggtgtcagccaccgcatccagccatgaaaagacttctgagtttgaaatgggaggctcagggttgaagttgaagctctgtcgtttaccggctcccacacttctttgttcttcaggtttcttcaataacactaatatatatttaacatattatatagcattggcaggaccagttacataatttgcatggtccagggcaaaagtaaaaatgctgggcttcttgtttaaacatttattaagaattttgaggtagtgacagctgaacattaaaccaagtgcagggtccttcacacaggggtcacaggcctgtgaagtgggccctgaacattggtctgaaaattggagattaggtgaatgaaaaccctttataaaaaacctgtgggctattcaaatgtgaggagttctttttattaagggatcactccccttgaattgttttggctattgggatttagctttataataactgcaattgtgattgagccctatggtgattacagttgaccttgaggcaatcagcctgcccgcaaggagtgcaattgagagagtggatggagagctgtggggtgaaggggacaaccttcagacatgttttccagctgaggaaactagaacagctccttggcctctctgagcctcagtttactgcactgtaaaatggagataatgatctttgccttataggaccattgtgaaaagactgagataatatatgtgaaattctgccataaagaaagtgattacgtattttcattcaagagcacaggctttggagtcagaaagagctggctttgaatcctgaatccacccttgtttatatatcatccttgaaagtgacttatcatcgctgagtctcagcttcctcattcataaagtaggaagaaatatatataatgtgtatcaaatagcttgtatactgcctgacacagaataggcattcagaatggtagctgtgctttccttcttatttctcttcctttcttccctgctccttcattctcctctgctgacctctttggtagatctggttgtgtcaaggtagaaggagagaaaggagtccttctgaaatttgatggttggaaccatcaggccttacatggtgtgactccatgaagtggtaaatactcagtgaatatgcatgtgaatttcagatgtagtttggaagaataattctgctacttgtgttttcctaaaattgttgcaggccactttgagaacattttagctgacaacagtgtgaacgaccagaccaaaatccttgtggttaatgctgcctactttgttggcaagtggatgaagaaattttctgaatcagaaacaaaagaatgtcctttcagagtcaacaaggtatgtggggcagcatgtagcagtaaaaggagcccaattatagatgtgaaaaatgatagggacagagtggggcataaatccattccaatgaggaacctgagggcacggccggcaaagtgcctttcctgagatgaacagctggaaggtaagtggtacaaaaagagccagaatccagaggccccccctcctcttttccataatgtcttcaaggatctgagctgagtgaaactttatagaatttgtaacccagcgaggaaagctaagtcaccagctgaaaaatagctacaaacatctgagaactttagcagaaaaggaaaagaccaaactctgttatcagaggactttggattatcatgaaaccttgacatctaggaatcttgttcctgattgattaacttctctaacatctcatttccttatcggttgatagcgaagtatattgttctgggattttaatttataatttataagatgctttgatggctgggcgtggtggctcatgcctgtaatcccatgactttgggaagccgaggagggcagatcacctgaggtcaggagttggagaccagcctggccaacatggtgaaaccctgtctctactaaaaatacaaaaattagctgggcatggttgtgggtgcctgtaatctcagctacatgggaggctgaggcaggagaatcagaccctgggagacagaggttgcagtcagccgagactgcaccactgcactccagcttgggcaacaagagtgaaactccacctcaagaaaaacaaacaaacaaacaaacaacaagaccagatgctttcaggcacttgttggctgtgaaaaaacaaagtatggcttactcattgacatcactggaagtcattatgggaagaattaagggcctgttttgcaggccagtctcattgatactgttgaagtaaatatgttaaataattaatagagggtgggcacagtggctcatgcctgtaatcccagcaccttgggaagtcgaggcaggcagatcacgaggtcaggagtttgagaccagcctgaccaacatagtaaaaccccatctctactaaaaatacaaaaattagctgggcatggtggcatgtgcctgtaatcccagctgctcaggaggctgagacaggagaatggcttgaacccaggaggcagaggttgcagtgagctgagattgtgccactgcactccagcctgggtgacaaagtgagactccatctcaaaaaaaaaaaaaaaaaaaaaaaagaaatgggtaaagtacctcttttgtaaatgagatcaaggaactgagactggaaatttgacccattttattggaaaacccagacatctatatgatgatgtgatgtggtctccgtgggtgggatctgacttgtgttagactggaagcagcacttcagttagtacaatacttgaaggtagcttagttacctgtagctcctacgcgtcagttctagttttcatgcttctcccagtagttagagtacttagcatcaatatcttgtttttgccaaatatagtagcaccttcttaatgctagcatccatgaggaaaagccctgcaagatacaatctatgcctgggttagccggatggcttccattactctttctttctttgttcccatggaatttttattcatactctcccctgtccactgccagaatttgcttttccacagtgaaatctgtttacttacatagatcccctactagcgcatgggatttttaaggtagggacaatgccttattcacctcagtgtctacaatttctggccaagtccctaacacatcagtaggtgctcagcaaatttgctgaatgaatgatcagtccctaagggtcagtttgcttaaacaatcaatagcagacaaaacctgactggcctttgggactaccatggtttcctatgcaagacccattgggcattttcactgggagaagacaatgatgactgttactgctccttaccaactcaaaatatccatgggagctgagggatgggtaggaggtcctcctaacttcctgagtttagcttcccaactgcagtggtcttctcaaagctgactgcagagacaggattgaccctgcacacaagaggtctgtctgagattctagagacatagcttatgctcttcacactcttgtgttttgcacacacaggtccttgagttttaagcatggctttttgaccttctcagtattgtcttttatctggagtggaagtggaacgtgactttacccagcctctactgtgagttagggaggggtgttggccccactggccctgacggcatccacacagcctttgctgtcatagagtgacccttctggctcctttgattagtgattggctctcctccatagcaagggctggcaaagggttcctaactctgtttaagtgaaatctgaaacaggttgccaatggtgcctctcttcaagaccccagagccagcctggaaggaacaccatgaaaatgttgcaatagtcaatgagtagaatgtggacttttgtgtcaaccacactaagggtcgtacttttttcattaagaaagtattaacgtgtgttttttgagaagggaggaagaatgtgtgctattcctttattcttgctattaaatcataaagctgggttatataagatcctggaaactcagcctttatgaacagaattaataaaagtttgaaatgtcattgatctctcagtgtttcacttgataaagcaataaaatgctattcacagctgcatgaggctacacccttcttttgaatgcagatgctattacttctcctttgttttctttgaattgctttgtccaccctagaactttttgagtgacattactaaaccttttcttatgccccgtggtgtctccggtaagggttagactaaattggtgaagttatatcattaaaagtttagtatagtacttattctgataaagatatctatccatatatatctatattagtatatatgttgtattatattttctggggtagatagtctttatttggtcctcttttcagaagatatgtcgtctcaacatgtgtttcagaaaataaagtacctgtagtcagtgccgataagtgaaattgatgacagtttttggaggccacaactatgtgcacattcagaaactatgagcagtctaacctgttggagatttttagacaaatttctttaggaggaatatattttaagacaatatcctctttaggagaaataaagggaagaattatctgttaacctccaaagtagtatgttttcctataattctgtttttggttacacatagagttgaagtcttccattatttatcagccaaatattcagtgagaaactacaagctggggtagaaaatgagacttagtttctgccttgactgtattctagttggggtgggaagtggaaagacaatcactagataatatttctaacactgtggcaagtgttaaaatagaggtatatacaaaagtaaaataaataacgtttagctctgctggagagaggtattggggaaggttcagcttagtatttgaagataccagatgcaagtttactggagtattatccttgcaggcttgatatgaagtttgaaatttctccccaaagagatttagttaacaggcaaatatcccatgggaggtatatgtcaataggttatacaacattactgtcagtcttttacaacttagcgtgaattaattttccttcaggaaatcagtcatctctggagcagagacaggaggccaggtgttaataggagcaaagagaagaaaaggcctgggcagtgcttggacataaaagacctgaacgatcagacccttccatgggctccctttaagaagagcagggagagaccaagggctaaagttgggagactgagaaaatgcagcccaccggggcattacttatttctccagctctgatccgctgttgtactaggggtctaatccggcctgtgtctgcctccttcttgaatagcccagagcattcatctaaacagccttcctacagcagctccccactttaggtgtggccagacaggagttctagaccaggttgtctcctgggacattgacaccgcagccaagtttattggtgctgaggcagacacagttggtgtggttggttcaggggctagcattggaatagcgtttggcagcttgatcattggttattccaggaacccatctctcaagcagcagctcttctcctatgcgattctgggctttgccctgtctgaggccatggggctcttctgtttgatggtcgccttccttatcctcttcgccatgtgaagctctgtgggggtcacctgcctgtccctgctgctgcggctgcacaccattcttggtgctgggctgtgctaagctttaccattgaacacaacgtttctgaaaaaaaaaaaaaaagagccaagcatacagtggagctcaaagggacttagagataattttaaaaagacttagagataattttaaagaacattttcctttttaaaaattatgcaatactccaagcattcagaaaatgatagagaataataaaacgaacacccatataccgatcaatcatctttttgaacttaatattttgccttaattatttcagatattttaaagaaaaaatataacaacagttgcattgctttgtatgtatcccttcactgctcactccactgtcctgttcctctttcttcctccccagtggtaaccattattctgaatttacaatttcttcattctactgacaagaatactgaggcctggagagattgagtgatttgctcaaggccacagaatctgtttatgtcacatttgggactaaaaaccaaggttcttatcttcaatttagactttgttaattagctcagatctgagtaggtggcagtacagtggggagtgggcaattcaaaccaaagacaaacagagaggtcacaacaaatattgttttgttctgctatgtgctaagtttgttgttgttattgttctgttttgttttgagatggagtctcgctctgttgcccaggctggagtgagtgcagtggtatgatcttggctcacaccaacttctggctcccaggctcaagcaattctcctccctcagtttcccaagaagctgagattacaggcgtgtgccaccatgcctggctgacttttgtattttttagtagagacaaggtttcaccatgttggccaggctggtcttgaactcctgacctcaagtggtctcccaaggtgcaggattacaggcatgaggcaccgtgcccagccagtttttgaaattaggcattttattaggaaaagccgtataaatggttatgtgggtttgcagtagaatttactttcaagtcagctccaccaggaatagtttaaagatctcataggcatctgtaaagaataacaaacgttgcctatatttacagccatacagtcttatttttaaggtttgatctatgcaaatacagtattatatatacttcatgtaatgtgtaacatgtagattataaagtatatgaataacttttcaaaggaacacaaactcttcacaggacagtctctggtttcagtgcaatacagtttggatctgagtggatgatgaattataagccataataatctgacactgtgtcaagagcaaatttgtgtatatatatatatgtacatatatatttatgtgtttgcctatatatgtgtatatatgtgcatgtgtgtatatatgtatggggtatatatatatagtatgtatatataagtgtgtatatataggtgtgtgtatatgtatatgtatgtatatgtatgtatgcatatatatgtatatgtgtatatataggtgtatgtatatatgtatgtgtatctgtatatatataggtgtaggtatatatgtatgtgtgtctgtatatatacatgtgggtatatatgtgtgtgtgtgtgcgcgcgtgtgtgtatatatatatatatatatatttatgcatgtgtaaattgaaaagtaagcagtccaaattttcccttttacagacagacaccaaaccagtgcagatgatgaacatggaggccacgttctgtatgggaaacattgacagtatcaattgtaagatcatagagcttccttttcaaaataagcatctcagcatgttcatcctactacccaaggatgtggaggatgagtccacaggcttggagaaggtaaggagaaggcaggtgctctccacaaaggcaccccctgccttggcaaagagttgtgccaacaggtctgtgtgggccgtgagagctgggccggtagccctcccttattgccactggctcagtcacctccaaggacccatggttctttctggggcctttcctccttaatattaacaacagccaaaatttatttggcacttacagtgttctagggactgtgctaagttgcctacgtgcattatctcatttaattcttacagcaggctgatgagttagagactgttaccacactcttgtttaccagtgagggagctgaggcacagaggggtgggtaactggttacataattagtcaagggtgtgtgcaggatcaggatttgggcccaggtagttggagccaggttcttaactgaaggctagagtgtctccctcacctcctaggcagttaaggcactacgttgctacgcactgccaggtccactatcatgtgacctgatgtcaagcatcctctctcttgctctttctttttttttaaaattagtagatgttatttttagagtagatctatgcctacagaaaaataagcagaaagtacaaggagttcccatatactccccttcccgtcccaggcctacagtttcacctgttattagcatcttgcattagtttggtatgtttgttacaattgatgagccaatactgacatattactattattattattattattattattattgttttagagacagggtcttgctccattgcccaggctggagtgcagtggcatgatggtagctcactctaacctcaaactcctgggcaggctggagtgcagtggcatgatggtagctcactctaacctcaaactcctgggctcaagtgatcctcctgcctcagcctcccaagtagctgggactaaaggcacacagcactatgcctggctttttttttttttgtaaaggtgggatctcactgtgttgtccaggctggtcttgaaatcctggcctcaagcaatcctcagcctcagcctcctgaagtgctaggattataggcatgagccaccacacctggccttcacaatttacgttacggttcactctttgtgttgtacatttatgagattttaatacgtacacatatatgcttcaaaattttgaattatgcagatactattttatagtacacattatatataagtattttattttatatgataagggttattatattattttatttatatagatttttaaggcacaaagtttaaataagagtagcagttttctctgcaggtgaatggagttttagcttcctctctgctccctcacctctgcttagctggctgaggcctgttctccctttagtccctccctggcttccattctagctccaccccgcctggcctcaacccttggccaggaaggaagaaggggctctttgaaggcctggatcacttgctatatatccacatgggcctcagtgatttgctgactttccaggggaccatccagtctccagcttgctcctttggttgccattatgttttagccaccactttattaactgaattataattcctgtccttcttcttctttggtgcattactctctctgttttttttctttccattttatgctttgatctttcagccattatccagctgtcttggattttacctttcgttcttaaaacgccctccaataaacatcaattattttcttcttcttcttctttttttatttcaataatttatttttcttttttttaattatacattaagttttagggtacatgtgcacaatgtgcaggtttgttacatgtatatacatgtgccatgttggtgtgctgcacccattaagttgtcatttatattaggtatatctcccaatgctatccctcccccctccccccaccccacaacaggccctggtgtgtggtgttccccttcctgtttccaggtgttctcatggttcaattcccacctatgagtgagaacatgcagtgtttggtttgttgtccttgtgatagtttgctgataatgatggtttccagcttcatccgtgtccctacaaaggacacgaactcatcattttttatggctgcatagtattccatggtgtatatgggccacgttttcttaatccagtctatcattattggacatttgggttggttccaagtctttgctattgtgaatagtgttccaataagcatacgtgtgcatgtgtctttatagcagcatgatttataatcctttgagtatacacccactaatgggatggctgggttaaatggtatttctagttctagatccttgaggaactgccacactgacttccacagtggttgaacttgtttacggtcccaccaacagtgtaaaagtgttcctatttctccatatcctttccagcacctcttgtttcctgactttttaatgatcgccattctaactggtgtgagatggtatctcattgtggttttgatttgcatttctctgatggccagtgatgatgagcattttttcatgtgtctgttggctgcataaatgtcttcttttgagaagtgtctgttcacatcctttgcccacttgttgatggggttgtttgattttttcttgtaaatttgtttgagttctttgtagattctggatattagccctttgtcagatgagtagattgcaaaaattttctcccattctgtaggttgcctgttcactctgatggtagtttcttttgctgtgcagaagctctttagtttaattagatcccatttgtcaattttggctttcaattattttcttcttaaagtatagaactaaagaaaatgaccttttgagttttggaaatgattttttttttttttttgagatggagtcttgctctgtcccccaggctggagtgcagtggcatgatctcagctcactgcaagctccgcctcctgggttcatgccattctccttcctcagcctcccgagtagctgggactacaggtgcctgccacgacgcttggctaattttttgtatttttagtagagacgggctttcactgtgttagccaggatggtctcgatctcctgacctcgtgatccacccacctcggcttcccaaagtgctgggattgcaggcgtgagccactgcgcccagccgcatctctctcattttttaaaacagctaaaatggatgcattcactacctatgaccctagggcatggctcagagttagttcaaattcccattaaaaaaaaaaagtaactttagctttaatttaattttctaaatctgatgccattcctagtacatgaatattctggatttcctcgtagagaaattacaataagcattcaagaaatatgtgtaaaaagctttctaattttatattcatttcactattgtgtatgcaacatcatgatccaggcatttgtttctataaatctactctctaacttaaggttgggtgcggtggctcacacctttaatcccagcactttgggaggctgaggctggcacatcacttgaagccaggagtttgagaccagcttggccaacatgatgaaaccctgtctctactacaaatacaaaagaaaatttagctgggcatggtggagtgtgcctgtaatcccagctactcgagaggctgaggcacgagaattgcttgaacccaggaggcagaggttgcaatgagcgacgatcacactattacactccagcccgggtgacagaacaagattgtctaaaaaaaacccaaacaaacaaacaaacaaacaaaaaactactctctaacttaaaatgaaaaaacagaaccctgtcctcataaatttcagtgcacatggaacactgttataggctggggaggaggaggacacagctgggtggctgctgggtctcctgagtcacataccaaaaacttctgggccatctttgatgttccacccagactgctttgaagctgggcttatcataacaccttatgttttcaattgagccaggtcttttacagttggaaataaataaaaataatttcttttcatttttgtccttcagattgaaaaacaactcaactcagagtcactgtcacagtggactaatcccagcaccatggccaatgccaaggtcaaactctccattccaaaatttaaggtggaaaagatgattgatcccaaggcttgtctggaaaatctagggctgaaacatatcttcagtgaagacacatctgatttctctggaatgtcagagaccaagggagtggccctatcaaatgttatccacaaagtgtgcttagaaataactgaagatggtggggattccatagaggtgccaggagcacggatcctgcagcacaaggatgaattgaatgctgaccatccctttatttacatcatcaggcacaacaaaactcgaaacattattttctttggcaaattctgttctccttaagtggcatagcccatgttaagtcctccctgacttttctgtggatgccgatttctgtaaactctgcatccagagattcattttctagatacaataaattgctaatgttgctggatcaggaagccgccagtacttgtcatatgtagccttcacacagatagaccttttttttttttccaattctatcttttgtttccttttttcccataagacaatgacatacgcttttaatgaaaaggaatcacgttagaggaaaaatatttattcattatttgtcaaattgtccggggtagttggcagaaatacagtcttccacaaagaaaattcctataaggaagatttggaagctcttcttcccagcactatgctttccttctttgggatagagaatgttccagacattctcgcttccctgaaagactgaagaaagtgtagtgcatgggacccacgaaactgccctggctccagtgaaacttgggcacatgctcaggctactataggtccagaagtccttatgttaagccctggcaggcaggtgtttattaaaattctgaattttggggattttcaaaagataatattttacatacactgtatgttatagaacttcatggatcagatctggggcagcaccctataaatcaacaccttaatatgctgcaacaaaatgtagaatattcagacaaaatggatacataaagactaagtagcccataaggggtcaaaatttgctgccaaatgcgtatgccaccaacttacaaaaacacttcgttcgcagagcttttcagattgtggaatgttggataaggaattatagacctctagtagctgaaatgcaagaccccaagaggaagttcagatcttaatataaattcactttcatttttgatagctgtcccatctggtcatttggttggcactagactggtggcaggggcttctagctgacttgcacagggattctcacaatagccgatatcagaatttgtgttgaaggaacttgtctcttcatctaatatgatagcgggaaaaggagaggaaactactgcctttagaaaatataagtaaagtgattaaagtgctcacgttaccttgacacatagtttttcagtctatgggtttagttactttagatggcaagcatgtaacttatattaatagtaatttgtaaagttggttggataagctatccgtgttgcaggttcatggattacttctctataaaaaatatgtatttaccaaaaattttgtgacattccttctcccatctcttccttgacctgcattgtaaataggttcttcttgttctgagattcaatattgaatttttcctatgctattgacaataaaatattattgaactaca

SEQ ID NO: 38 - RNA, 2633 nt, Homo sapiens
agugggcguggcggugcugcccaggugagccaccgcugcuucugcccagacacggucgccuccacauccaggucuuugugcuccucgcuugccuguuccuuuuccacgcauuuuccaggauaacugugacuccaggcccgcaauggaugcccugcaacuagcaaauucggcuuuugccguugaucuguucaaacaacuaugugaaaaggagccacugggcaauguccucuucucuccaaucugucucuccaccucucugucacuugcucaagugggugcuaaaggugacacugcaaaugaaauuggacagguucuucauuuugaaaaugucaaagauguacccuuuggauuucaaacaguaacaucggauguaaacaaacuuaguuccuuuuacucacugaaacuaaucaagcggcucuacguagacaaaucucugaaucuuucuacagaguucaucagcucuacgaagagaccguaugcaaaggaauuggaaacuguugacuucaaagauaaauuggaagaaacgaaaggucagaucaacaacucaauuaaggaucucacagauggccacuuugagaacauuuuagcugacaacagugugaacgaccagaccaaaauccuugugguuaaugcugccuacuuuguuggcaaguggaugaagaaauuuucugaaucagaaacaaaagaauguccuuucagagucaacaagacagacaccaaaccagugcagaugaugaacauggaggccacguucuguaugggaaacauugacaguaucaauuguaagaucauagagcuuccuuuucaaaauaagcaucucagcauguucauccuacuacccaaggauguggaggaugaguccacaggcuuggagaagauugaaaaacaacucaacucagagucacugucacaguggacuaaucccagcaccauggccaaugccaaggucaaacucuccauuccaaaauuuaagguggaaaagaugauugaucccaaggcuugucuggaaaaucuagggcugaaacauaucuucagugaagacacaucugauuucucuggaaugucagagaccaagggaguggcccuaucaaauguuauccacaaagugugcuuagaaauaacugaagaugguggggauuccauagaggugccaggagcacggauccugcagcacaaggaugaauugaaugcugaccaucccuuuauuuacaucaucaggcacaacaaaacucgaaacaucauuuucuuuggcaaauucuguucuccuuaaguggcauagcccauguuaaguccucccugacuuuucuguggaugccgauuucuguaaacucugcauccagagauucauuuucuagauacaauaaauugcuaauguugcuggaucaggaagccgccaguacuugucauauguagccuucacacagauagaccuuuuuuuuuuuuccaauucuaucuuuuguuuccuuuuuucccauaagacaaugacauacgcuuuuaaugaaaaggaaucacguuagaggaaaaauauuuauucauuauuugucaaauuguccgggguaguuggcagaaauacagucuuccacaaagaaaauuccuauaaggaagauuuggaagcucuucuucccagcacuaugcuuuccuucuuugggauagagaauguuccagacauucucgcuucccugaaagacugaagaaaguguagugcaugggacccacgaaacugcccuggcuccagugaaacuugggcacaugcucaggcuacuauagguccagaaguccuuauguuaagcccuggcaggcagguguuuauuaaaauucugaauuuuggggauuuucaaaagauaauauuuuacauacacuguauguuauagaacuucauggaucagaucuggggcagcacccuauaaaucaacaccuuaauaugcugcaacaaaauguagaauauucagacaaaauggauacauaaagacuaaguagcccauaaggggucaaaauuugcugccaaaugcguaugccaccaacuuacaaaaacacuucguucgcagagcuuuucagauuguggaauguuggauaaggaauuauagaccucuaguagcugaaaugcaagaccccaagaggaaguucagaucuuaauauaaauucacuuucauuuuugauagcugucccaucuggucauuugguuggcacuagacugguggcaggggcuucuagcugacuugcacagggauucucacaauagccgauaucagaauuuguguugaaggaacuugucucuucaucuaauaugauagcgggaaaaggagaggaaacuacugccuuuagaaaauauaaguaaagugauuaaagugcucacguuaccuugacacauaguuuuucagucuauggguuuaguuacuuuagauggcaagcauguaacuuauauuaauaguaauuuguaaaguugguuggauaagcuauccguguugcagguucauggauuacuucucuauaaaaaauauguauuuaccaaaaauuuugugacauuccuucucccaucucuuccuugaccugcauuguaaauagguucuucuuguucugagauucaauauugaauuuuuccuaugcuauugacaauaaaauauuauugaacuaca

SEQ ID NO: 39 - protein, 375 aa, Homo sapiens
MDALQLANSAFAVDLFKQLCEKEPLGNVLFSPICLSTSLSLAQVGAKGDTANEIGQVLHFENVKDVPFGFQTVTSDVNKLSSFYSLKLIKRLYVDKSLNLSTEFISSTKRPYAKELETVDFKDKLEETKGQINNSIKDLTDGHFENILADNSVNDQTKILVVNAAYFVGKWMKKFSESETKECPFRVNKTDTKPVQMMNMEATFCMGNIDSINCKIIELPFQNKHLSMFILLPKDVEDESTGLEKIEKQLNSESLSQWTNPSTMANAKVKLSIPKFKVEKMIDPKACLENLGLKHIFSEDTSDFSGMSETKGVALSNVIHKVCLEITEDGGDSIEVPGARILQHKDELNADHPFIYIIRHNKTRNIIFFGKFCSP

SEQ ID NO: 40 - DNA, 25630 bp, Homo sapiens
agcaagggcctccctcccccgcatcacgtgatctcagctccttttcagctagtgggtggaaccccaggagggaaaactcagggaagcccaggtgagagcgacgcgaccgatggggcccggatttcttggatgctgggggactgtcccagtaaggcttgggaacctgggtggggcgcctttcagaacgggaccgatgggagagagacgagaagggttatgggcacgaaccccgttcagtatctgctccttgcgcagtgtgagaactgggagagagactcctggcccttccacttcctgtgcttccttgggtgagtgtcttaacatctcagaatctcagtgtcctcacctgtggctgccagtatgaaatgaaataagcacataagtcataaataaatggtatcttattaggtcccatttaagcgaatgtgtgaactctcagagacaagaagaccctggaggccactgtagctcggccctgtttggaggcaggcctctccaccctcacccaggacaccagctcctgctgggtgctcccctccctggagtgctcacccctaggcctcaggagtggaagggtctgggagagctggctggaagaggggctcctcccagttcccactgaacgggctgacaggtcggactctccaagacaaagtctcctctttctgtctccacacagggcccgtgttgtgcttttggcccaggtaggtggacagacatgtcccaggcgggggacgtagaaggccccagcacaggagaccctgtgctcagtccccaacacaactgtgagcttttacagaacatggaaggagccagctccatgccaggcctgtcaccagatgggccgggagcaagctctgggcccggagtcagggctggcagcagaaggaagatccccaggaaggaggcccttcgaggtggcagctcccgggctgcaggtgctgctgaggtccggccaggggtcttggagctgctagctgtggtacagagccggggctcgatgctggctcctgggctccacatgcagctgccctcggtgcctactcaggggagagctctgacctccaagaggctccaggtttctctgtgtgacatcttagatgacagttgccccaggaaactttgtagcaggtctgctggcctcccagagagagctctggcctgcagggagaggcttgcaggagtggaggaggtgagctgcctcaggcccagggaggccagagacggtggaatgagttctccagggtgtgacagaagaagccccacactcagcaaagaggagccccctggaaggcccctgacatcctcaccagacccagtccctgtgagggtaagaaagaaatggaggaggcaaggggctcattcagagtgtgaggaaggggctggtgacttcctgtggcttgatcagagccctcgtggggacaacctcctgtctgtgggagaccctccccaagttgctgacctggagtccttgggaggcccttgcagacctccctctccaaaagacactgggtctgggcctggagagccaggtggaagtggggcaggatgtgcctcagggactgagaaatttggatatttgcccgctacaggggatgggccccagccaggcagcccctgtggccctgtcgggttcccagtgcccagtggaggggagtccctcagttcagctgcacaggctcctccacagagcgcagcactgtgcctgggggcgtcagcacaggcctctgcagagcagcaagaagctgtgtgtgtcgtgcggactggcagcgatgaaggccaggctccagcacaggaccaggaggagctggaggccaaggctcagccagcttccaggggaaggctggagcaaggactcgctgcccccgctgacacctgtgccagctcccgggagcccttgggcggcctcagctcctccctggatactgaagccagcagggcctgctcaggcccattcatggagcagagaagatccaagggcactaagaacctgaagaaaggtccagtgccctgtgcccaagaccggggcacagacagaagctcagacaactcccaccaggacaggccagaggaacccagcccaggaggctgccccagactggtgagctgagtctgagagtttgggataggaagggcctggccatgtttctcaataccatacttggcagtggaatttaataaagctaagctagatgggcgcttcatgaacattctcacatccctattaactaaactgggtaaaatgaggcccacaaactgggaaagagaaaataaactacattcgctgaatccttgtgaggggtcattatcttttggagtcagtgagtcctgggttcgaattttgcctctgcccacttcctagctgaatgactgtgggatgttttcttaacctctctaggtttcctcattgtaaaaaaaggatactaattgcagcttcatggggttgtttcaaggattaaatgagattatggtataaaataatgtgcctaggcctggtgcagtggctcacgcctgtaatcccagcactttgggaggcagaggcaggcggatcacgaggtcaagagatcaagaccatcctggccaacatggtgaaaccctgtctctactaaaaatacaaaaattagctgggcatggtggcacatgcctgttccagctactctggaggctgaggcaggagaatcacttgaacctgggaagcagaggttgcagtgagctgagatcgcaccactgtactccagcctggtgacagagcaagactgtctaaaacaaacaaacaaacaaaaaaaaggtgcctagcacagcacaaggcacaaggtaaattgcttaattcgtgttaaatttgcttttcctttagtgttcacagttaccctgtaagataggcgttagccccatataaccagatggggaaactgaggctcggagggttaataatattctccaggctcacatagctggggagtcagtgaccagccatgttccctatatcaccacttccctttcctttgttcttttacttataatcatcatcattttattaataatcatagctaacatttatacaccaaaggcagaagaagactctacttgtttttggtgtatatttctcacatagttggattttcatcacatttattgaatatgcatgatgtgctagatgtttttgatttaatcttcacacgacgtccacggaggtgaggttacagacccagctggtgaatgggagcaaggctacaagcctaggcggtctgtcttgagagctcactgcactgccttctctgtgtattttctgtgttatcggcacagtcgtaacagcatctggcttgcttaacatgtgctggatattgggctaagcactttatctgcaatctttgtaacaagcctatgaggtagactctattgacatatacccatttcactgatctgaacactgaggctctgagaggtgacatgagtactcaaggccaaacagccaattagtaaaatagaaccagtgagctgttttccactatgcatcaagcctttttacctataaataggctcctattatgccttattgttccaggactttgcttggttttgtaagttccgtagtatttgaaggtctttcccagtgggttcaccttgttctgccgaatttgatcttttcctgagccctgcatcatagctgtctatggatgtatttgtcgcaggcacaggcgctgtcgggatgagggctgggacttcctcttctcatttccaaccactgtagtgtagtgaggagcatgagccctggaggccaataggctaacattcaatcttgactttgccactatctgaacaaccgaggtgagtggcttcaccttttcaagtgtaattctctcatctgcaaaatgtgggtatgaagagtgcttacctcctagggaggtggtgaggatgaaatgagatgacacatgtttggcatttaacacagtgcttggtgcaagaaaaatactcaaataggttacctgttagtgacataagcaatttcgtcctgctgtaagtagtgcaggggtgaccatccttgtgcgtctggctcctcccttcttcacatgatttatttggaccagatgcccagaattgggattcctgggtctgcagcctttaagggggctggtttgagtgcggtggtggagccagcttcctgcctggcttgactggaagcagcccatgactgctggctcctccaggctccatccttgactgcggcacagcccatcatcccacagctttccaaacaactcgttgccatgacaaccagtaccagctgcgggagaagaattgagtctgggctgtgacagggacaggcgggtggttgcagacagggctgagtggggcctgggcaatggggggcacagtgcccggctggtctggagccccgtttagggccttagcaccttcccctggagacagcctggcttgtggcaggggcagacaggttcaaggtcaagctctgcctcttagtacagggtgactttagacatgtcttcagacatttagatgagtttaacttttttttcttcctttcttaagctcagtggcaagaagacttttttttttttaatttactttttttttaagatgggagtctcgccctgtcacccaggctggagtgcagtagcacaatcttgactcaccacaacctttgcctcctggtttcaagggattctcctgagtagctgggactacaggtgtgggccaccatgcccggctaatttttgtgtttttagtagaggcaggatttcactatgttggccaagctggtctcaaactcctgacctcaggtgatccgctgcgtcggccttccaaagtgctgggattacaggcatgagccactgcgcctggctgcagaaagactttagacatttagaaatgtctcttctctgaatctgagttgcctcctctatgaagtggggagaatgaagtgggccccagaactgccaggagtctgatatcagaggctggccgtgttgtattcttctggcatgaaccagagactcttggaggagagatgggagggggactggatgccattctcttgtccgtcctgggccccacagtggccagtgaggtttggagctgctctatgggtgggatagcagtgggtgtgtgtgtgtggggcaactctgccagtgaccctgggctgctcacattccaccagtcataaccagggaggcacacagctcctctggcctgacccagaatccctggttcaaggtatgctgtctgtagctgcaaagtgtcaagaggtgagtgaaggaggagagtgtcttcctaacagaagagcagcctaagaggagctcgtttcattagtgtgcctactatagactgagagcttcaagtatgtcatctcatttaatccttacattaaccattaaaggtcaatgtcggccaggcgtggtggctcacacctgtaatcccagcactttgggaggccaaggcgggtggattgcttgagctcaggagaccagcctgggcaatgtggcaaaaccctgtctgtagaaaaaatacaaagattagctgggcatggtggcttgtgcctgtagttccagctacccaggaggctgaggtgagaggatcacctgattccaggaggtcaaggctatagtaagctgtgctggtgcccctgccttccagcctgggcaacagagtgagaccctgtctcaaaaaaaaaaaaaaaaattcaacactaatatccccattttactaagtaagaaaactgggcttccgagaagttaagtgactcactcaggccacatcgcgagtaagtggccgagccagggtttgactccagtcctgcataacttgactgttcacggggctttattataatttgttgaacaaggagggggctcgtccagggatcttacagtctagtgggaggagaaaaccactaaccagagaattgaaatacagactgaagcccagtggactgtggatgtccagaggggaggggagggcagaggagggggctgtctaaactgggtctaggcaagggaagtaggtgttcagcaggtgagaaagtaggagaggcttgctaggaagagggcagtgctctgcagagctgcattgcaagaggcagcttggagtgttgcaggagtagagggtgggggttacaggtggaacgggagccaggtgggagaggccagcttgaatggaaatggagagcctgcagggtggtcgagtgtcaggatggcctttctccagggcagggaccaaggaactttatcaacacaggcatttacagagagagcttcttctgttccaggcactgttctaagagtctcgaatagtgataatgatcgttgccccaacaccatgaggtagatactggtattatcttcatgctactgatgagaaaactgaggcacagagagattaagtaactttcccaagatcacacagttcctaagtgttggcaccaagtatccccattgcatgaatatgccccaatttatttatttgttgactccatgtggacatttgggttttttggtgtttttttttttggctactacatatagtgctgctgtgatagttttgtatggtttttggtacatatggggtatctccagggaatattttctggggtggaattgccaggttatagagtggacacatcttcaacttaaatggtgccagatgttttctaaagtggttgaaatagtatacacccccatcagcagtgtatgaatattctggtgacttcacatcttcaccagcccttgatggtagcagacttaggttttttgctgaaatggagatatgctgtggtgtctcaatgttgttttaatttccactgccctcttactaaggagcatcttttcatgcattttggttattcttattaagtcttttctttaaaaagttttttggctggagtacagtggcatgatctcagctcactgcaacctccccctcccaggttcaagcgattctcctgcctcagcctcccaagtaactgggattacaggtacccgccaccatgcccgggtaatttgtgtatttttagtagagacggagtttcaccatattggtcaggctggtcttgaactcctgacctcaggtgatcctcggcctcccaaaatgctgggattgcaggcatgagccaccaggcctggcctgttttgtgctttgcatatgttttgcatttctacactttctcccatgtaaaaacacaattgagttttgtttattgattttgcatccagaaatcttgcttttattaatctatataatttatctatttggattttgtttgttttctatgtagacaaatgacagtttttgttatttcctttccagttctttacatctctcttcccttccctttccttactgtactagctaagactgttagtatagtgttgcatagaaatggtgatagcaaggaacccgtgacttattctggattttaaaggaaatgtggtcatcgtttcaccttaagtatgacacttgctatgttatttatatagatgccctttatcaggtaaaggaaactcccttctcttcctggtttgctaattatttataattattattataattattacaattacaatatttacaattattataattattattattgcacagtgcatttaatcacatgtgttttttccatttctgagataatagtatgatttttatcttcgaatttattaacgttaatttaaggagttagtgtttttttttttaaatattaagttttttaaaatgttaagttcttgccttgctggaacaaacccaatttggtaatgctatatctttttcgtattttgtgaattcaatttcatgttttgtttcgggttttcaatggatgaattaactggcctgaaatgatttgttctataatacccttgtgagattttggtatcagggttttgctagcttcatagaatgaattgtggattatctttttgttttctattttctgggataatgtatttaagattggaattatttgttctttggacattttgatagaatggctggttaaaaaaagtatggactgatgttctctttagggaaggtgtttccttccctactgattcaatttatcttgtggctataggtttattcagtgttgtttttctcttgaatcaattttggtaagttatacttttctagatatctatttgtttcatctgagttttcaaatttattggcatgttggcatacagtatttcacaatagcctcttatctttaaggactgcgcacttgtaattatacattccaaattttagctagttatacctcctctcttttccttaatcaatcttgtcagacaattgtcagttttttcaaagaaccgatttttggtttgttcatcctctccactatatgtttgttgtcaatgtcaccttccgttcagtttatgctactatttataaagtcttaaaaattatgcttagttcattagttttctgccttttttcctttctaataaagtcatttaaagctataaaagaaccttttaattatcgcttttgctgcattcatagacttaacatacagtcttatcattcaatctcaatattttatcatttttaattacaatttttctttgacctatctgttatttaaaagtcccttccctccccttctcttccctccccctccctcccctcccctcccctccccttttgagacagagtctggctctatcccccaggctggagtgcagtggtgctatcttggcttactgcagcctccacctcccagcttcaagcaattcccatgcctcagcctcccaagtagctgagatcacaggcgtgtgccaccacgtctggctaatttttgtatttttagcacggagatggagttttgccatgttggccaggctggtctcaaattcttgacctgaggtgatcaacccgcctgacctcccaaagtgctgggattacaggcgtgagccaccacgcctggctaagagtgtatttcttaatttccaaacatattttgttgcttttgtctttattgccttctaacttaatgatattgtggtctgagaagttggtctttatctgagttatccagtctgatagccactggccgcttgtgtctattgaacacttgaaatttggttagtccaaattgagatgtactgtaagtgtaaaatatacactgaatttcaaagactcagtacaaaaaaaagtaaacatttcattaatagttgttcatggctgggcgcggttcctcacgcctgtaatcccagcactttaggaggcctaggcgggcggataatgaggtcaggagtttgagaccagcctggccaacatagtgaaaccctgtatctactgaaaacaaacaaacaaacaaaattagccaggcgtggtggtgggcacctgtaatccaagccactcaggaggctgaggcaggagaatcgcttgaacctcgggggcggagactgcagtgagccgagatcgcaccactgcactccaaccctgggcaacagtgtgagactccgtctcaaaaaaaaaaaaaaagttttcatatcgattgcatgttgaaatgataatatattggatatgatgaattaaagaaactacaaaattaatttcactttttaaaatgtggctaccatatttaaaagtacacatgtggcttatgtttctgttgggcagtgctgatctaaaaaagtcttttgaaatttgttgatatttgctttttggcccaggctttgctcaatttttatatatgttgcatgtatactggaaaataatatgtattctctagttattaggattaatattccgtatatatttatatatatgtacagatgaagcttgttgatttcattaattattttttattcctactgattattttgtcagctttatttatcaatagttagagagatatatgaaattttcttgctctcatggtggatttgtctttttgcttgtagttttttttttgctttatagtttttgagcttatgctattagatgcttataagtttagagttgttatagcttcctggtaaaactacatatcattatgtagtcagtctttgccctctaatgattttttgccttaaaatctgttttatctgattattaatatagctacaaagctttattttggttggttatttgcctgttcgtatattattccattttgttattttaacctttttgcataattatgttttagaaatgggtctcataaagactttataactgtattttctttccttaaaggtctgataatttttgtatttttctgaagtattagtacatttacatttgttatagttactgatttatttacatctactcctaccattttattctgtgcttttttttgagacacagtctcactctgttgcccaggctagactgcagtggcgtgatcatagctcactgcagctttgatctcccgggctcacaattctcccacctcagcctcccaagtagctgggactacgggtgcatgccactgtgcctggctctttaaaaaaaaattttggtagggccagggtctggctgtgttggccaggctggtctcgaattcctgagctcaagcaatcctcacacctcagcttcccaaggtgctgggattacaggtgtgagccactgcacccggcctgttttgtgctttgcgtatgttttgcatttcagcactttctccctttcattgcctccttttggattattttttcttactcctttttatccctctagtagtttagatgtttcctatcctcagtttatatttttttggtggttctcttagaaatttgagcacaggccgggctcggggctcacacctgtgatcccagcactttgggaggccggggccagtggatcacagggtcaggagatggagaccatcctggctaacacggtgaaaccctgtctctactaaaaatacaagaaaaaaatagccgggtgtggtggcgggcgcctgtagtcccagctactcagaaagcctaggcaggagaatcgcttgaacccgggaagtggaggttgcagtgagccaagatcatgccactgcattccagcctcggtgacagagcgagactccatctcaaaaaaaaaaaaaagaaagaaagaaagaaaaaagaaatttgagcacaaataactaacttatcaaagtataaaggtagttacaatctttgtcttactccaaaatgatatagggatcttggaatgctctaattccaagcgcgtacctttccaatttgtgtgttgttgttatccagtaaattagtcctatctttttttttaaaaaatccccaaattacacactgttattatagtttcatacaatcaatgtttatttagatttaacaacatcttcatcattttctttgctcaaaattcttcctttcatcttatctatctgggattgtttttccttccttctgcctcaggtttatcttttagcattttgtttattgagcaaagcaaaattatcaagaaaaataacagctctcttgatttttctctacagtatctttatttcttccttattcttgaaaagtattttgtctgggtccacaattgatagttattttctttaagcacattgaaaatattatttttttatgttttgcttttcattattactattgagaaagtagctgttagtctaattgccattcctttatagatgaaaggtattttggtgaatgggatcatagaatagtagttgaagttatggcctctggaatcagactgtctggatttaaatcccagctctttggttttctagctgtgtgacattgggcaagctgattaacctccctgtgcctctatgtgccttagtttcctcttttgtaaaatgggggagataacagtaccagtacctcataagattatggtgaggattaaattaactaatatgtaaagcacttgccacagatgtagcacattttaagtgctagtcaagtgttagctattattttttctctttatgcgtgtaaggatctccttatcatgagtgttgatgtgtctaggtatgaatttccttttatttattctgtttgagattcactgagctttttgaatctgtaaatttttgtcttttatcaattttgaaaaattcttagccctatttctttaaacactgcttctacccattctctttcctctctccttctggaactttagattaatcattttcacccttccttccttcctttcttccttccttccttctttcttcctacctttctttcttctttctttccctcctcctcctccttcttctcctttcctttcctttccctttcctttcctttcttctcctttcttttcttctcctctcctttcctttcctttattttgagacagtgtcttgctgtgtcacccaggctagagtacagtggtgtgatcatagctcactgcagccttgacttctccggctcaaacaattctgccgcctcagcctcctgagtagttgggactacaggtacacaccaccatgcctggctattttttttttttttcttgtttttgtagagacagggtctcgctatgtttcccaggctgctctcaaacttctggcctcaagcgatcctcctgtctcggcctcccaaagtgctgagattacaggcgtgatgtgtctcttagtgcttcacagtgttcacaaagtgcaacacatttaatttatttaaatgtgttgtccagttagctaatttgtttcagctgcatctaatatgctattaaatctatatattgagtttttaaattttaattaagatcgttatatttttcattcccagaagtcgtgtttggttcccgatcaaatctgcccggttgttttttgtagtttttttgtccttcactcatgtgttcgtctccttcttttatttctttaaacatattatacatacatagtttgtattctggtctgatagtccagtgttgaaaggcttcgctcatctcattctcctgcctgttgttttggagcctcataacatggacgttaggacccctgagacgggccagccaaaaggctttgaactgtgaagggctggtcttgatattcttcccacacccctgttttctttgttttttttttttctgcctctttctcagtttacttttttgaaaggctgattcatttccatggttcaaaaaaacaaaaaaagtgaaactcatctttcccggcacccagttgcttccctactggcagcctgggttagataggttcttgcagatacttcctgtgatattttatgtgtattccagcaaatacaaattttaaaattcgttctgtctgtaacgcgaatggtagcacaccacacgtattgttctgaacttgtttttaataaaaaaacatgtttccggttgtaaaagaaatacacgctcgttttgaataacatgaatacccaagttcctacaagtagaaagtgaaagtctccctggaatttcattccccagagataacctctattatgtatctgtaaatatatatttacataaatgggcttatgcaacagatattgttctgtaacctattttttctttttctcccaataatacttcttgacatctttccatgaatctttccatgtctccacatagccccgcagctaagtgcttgggctttggagtcagacagagctaggttctaatactagctctgcagcttagcagctataggacttttcagatcctcttggagcctcagtttcctcatctgtaaaatggggatagaaatagtatatacctcatggtgtcattctgagaccttaatagcatgaatgatgtgcttctgtggggccagctacttcataaaccctcaacaagtggtaatttttatgatgacttccttaccctttataagccacatagaattcgtagtatgaagtgtcaccatttattaaccatttccctttgatgggccttttttttgagatggagtctcactctgtcacccaggttggagtgcagtggcacgatcctggctcactgcaacctccgcctcctgggttcaagttattctcctgcctcagcctcccgagtagctgggattacaggcacccgccaccatgctcagctaatttttgtatttttagtagagacggggtttcaccaggttggccaggctggtctcgaactcctgatctcaggtgatccacccgcctcagcctcccaaagtgctgggattacatgcgtgagccactgcacctggcctgatggacatattttttattaaccatttcccctttgatggacaactttttgctgtaagtacaactcagtgaacactgaacacacaccctttcaacaagattgtcttctttttgtgaattccctgccatggggtggctgggtcctctggattctaatctctgcatcctctttctctccaaggaggaagtgaaaataccccatggagtgaagcttgtgtgctacgtaggtttttacattttattattgcttttctttctcccttgcctcaggtggggtggagtgggagggctcctccacagtagatgtggagatcctacccccacccagcctgccctcccccagtggatcctagtgctcccctccctctataatgttggatcttagacttttagtttcctgcagaccttggaacctgaccatttcatgatcattcattcaaggattagttttcagactcacctacttttaaaacaattccctgtggtttgcaataaatgaaaagaattgaaacacacttaaaatgggctaaaagcctaaagaaagcaagaaaagaggaaggaggtgggggatcttgttacaacaacaccttgctctctaccaatcctggaaaggtacacctgccaggctcaaagttaacactgagcttcctggcagccatagcaaaaagccgagcgggacagattccgtagttcattagaagaacaaaatctactttgcaccttgaaatggtcatgaagggatttcttttatgggcaataggggagtgatcagcagccttacagagtgtaagccttacagatgcctgcatttggctgcttcaagggagaggcagacaacaagtcagtgacccctgaaaggggcatgacagagctttgagcaggaggagggggagtcagaacaaggtatgtccctcctgatgagatgcatctgtggtcagaagaagagtgagagggtcctggcacagagttcagttaactatgaatgtgactgggggttaagggggaagttgagaaaggatgcggatggagacaggcccctctcctgggacagaggctagccaggtagcaaactttcactgaacactatgtgccaggccttttccaagcattgcaaatacagcggggaccaggacaggcatgttctctatcctcacggagcttacactccagtgggagagagatgttcaacaattacagatgaggcgagcactctgaaggcggggacagcggctggccccgcttgcttctgaagtgcgatctcccccgcagctgggttccgggccagtgatccagctcctgggggccatcagccacggccaggcaggggggcagctgccaccaaagctggaggttctagaggacttgatggaggtcagctcaccctcacctgcccagaggctcagaaggaagaaaaggcccatggtgcagggccctgctgggtgccaggtacagaacaagtgatgtcatttaatcctgctgagagaggcaccttcacacctgattcacagagatgtcactgaggctcagagagagggtgccacttgctcgcggtcattcagaatagccagaggcagggttcggccccagcctgcatggctggcctgggctccatgtgtactactttctgcagctctgaattcagggtggactggaggagggaggggctgggcctccagtacatctggggagggaacagtccctggcctccatttccggccaatagcttgtctgctccctgccccaaggttttccagccttctccttcaggaggcacagcaggggaccctggtggcctctctgaccccttctaccctccaagaagcggttccctggcccttggcgaccccagctcggaccctgcatgttcccaggcaagttgttctgccccggccatgtgcctccttcactggagcatgggtcagggaggacgtgggagtggggaggtgactagaggaagcagtgtcccctgggctggaagccaggcccaccagcacagcctcaattcctcacgcctcccctacagagtggcccaatggaggctgaagaggattctcttccggagcagccagaggactcaggtgaagggccctggagggagcctcttctgcttccagagactgctggggtctggggaggactcaggcccagctcctgggcccagcccctgctatgattcttctctccccacatcccatcagcctatagctcctccccaaaggggtgggggaaggggtgggggccactggctgcctgggcttggctcccagatggatagagggaggggtctaggtctttgagggtgggacccctctcctgtctgcctaaacccatcagccttgagtcagccccctcccctttcccctgggcacccctgggagcctgtgacgctctctccctacagctcagctccaacaggagaagccatccctgtatattggggtgcggggcactgttgtccgttccatgcaggaggtactatggactcggtgaggccttgctccccactcccctgacatcccaagggccgccctcacatgcccccgcctccggggccctgccatgttctaagggcttctgggtgtctggctaaccccatttggtagctgtgccaggtcccttgcccataccaagagccagtggagagctgaaatttgaagctgggtctctctggctttaaggctgtgcttccccacttagctgctgcagctctcagcctcggctcaggtccatccacatcaatgtcacccgcagcaaatgctttcacgtagagtgtgtgctgggagcggctcagagatctgagcccagagctgtcatttgctgatggggagaccaaggctcagagagggttggactttgcaaaggccacacagcaagtcaatgacagatgacaccgagggccagggctccattctctccccctgactcctgccttactctgacctgaccccggcttcctcccctccacacatcccgtgagccagagacggggcacaggctggtgagtcagacagtcgagtttcaaatcttgcttttgccactaattacacagttgtgagtaagcctcttattttccctgagccccagtaaccccatccataaaaggagaatgatcctatttcctcctcacggagttggggtgagaataagtaggttcctgcagggaaacacccacgacaggaacaagttggcccagaccctgccgcccacccagctgcctccctctgggactaagtgcctggagagcctcctgggctcagtgcccccgccctgccctggcctccacagccttcgggagctcccagacccagtgctgagtgaggaggtggtggagggcattgctgctggcattgaggcagccctctgggacctgacacaaggcaccaatggccggtacaagaccaagtatcgcagcctgctgttcaacctgcgggaccccaggaacctggtgagcagggctttgggctgggctgcgtcccctctctgaatctcagagcccctgcaggatgctagggtgggggagctctttcagcgtgtggtgcagccctgccccctgcccccaccaggacttgtttctcaaagtggttcatggagatgtcaccccctacgacctggtgcggatgagctcgatgcagctggccccccaggagctggcccgctggcgggaccaggaggagaaaagggtgagtgctgagcccagtcgggatgggtgaggggatgtaggggcagagtgggtggcctgagagtggaagagggagagacagagacagggagggagggaggaggaattcagaaagacagaaacaaggaaacagagaaggcagatagggagtcagagagaccctccccacaagagaaacaggagaaggggtggaaatgaaagggactgggaatggagagcttggtagagatgtgacacacttggttttcagttgagctggactgtggggtggggggcttgggagaggactgtggtgagacctagagtccggagtcctgaggtacctcttttccgatcccagcttcagatgccctggaaaagcctggaggtcttcctggtaccccaggttgggggaggggccccatagcccctgggttcacagctgtgtccccatataccctgtatccatgggtctctccctgcctgggaactgctctgggacagggaagctgtggcactgagcaggctttggagaatgctcacctcatgtttgttggtggcccagtgagagaagaagggactgatttaggggctgaggccactgggatggggcgaggcactccagcccctgctctggaagacactgaactgattagaatgaataaccaagagtccatcaggtgaatctgtccactataggctgagcttctgtccaggctctgtgggggccagggatcaggactggctttgtaatttgtgggagccagtgcagaatgaaaatgtggggccctttgttcaacaactgctaagaatttcaaggtgacaacaacagagcgctaaaccaagcgtgggcctcctaagtgcagggccctgtgcgattgcacagatctcatgcccacgaggctgatcccaccagagaggagcagacctcctgttctccaggggttgttagaaaaggagagacaggttttcaggaagtattgcagatagagtgacattgatcgacagtaagactcacaactagcatttactatgagccatgttccaggctaagcactctatatatgttgtttaatatagtgctttaaattaaattcctacagaacagataaactgaggcttagagcagctaagtgcttgccccaggccataccatcttatgaatctttattaatggcccagtgggaactccagagcctgcactctttcagcaacaccacacccttcccagaaaaggatgaggtaccgtcagaggttgaattgacctgtgagtgaaagcgaaatccgggaaggcttcccggaggaggcaggacttgaagggtgaatcagtggaatacggagaggtagcgctaagggtggagggcttcccagaggaggggtatggcggaagtaaaagttttgaggagaggggaaccacaagagaggggcctcaagggaggaaagtgagcacttgggcttttgatggccagaggccccctaactgggctcagcttggcctgctccacctcttcagggcctgaatatcattgagcagcaacagaaggagccgtgcagacttccagcctccaaaatgacccacaagggcgaagtggagattcagcgggacatggaccagacactgaccctggaggatctggtggttaagttggagcctgacctggtgctgggcagagcccatgcctgggggtcccacgcctcgcctcaccagcagtgtggtcttgggcatgtcacctgactgctctgaggcccaccttgtttgtgataaaacggggacagcgatccttaacgcataggggaacatggggtgggacagtgctgctggcacaggcctgccagcgccttgtcactgtcggtcctcctccttttggcctcaccccaaggcccccacatgagtggtattaagtcccatcatcatagtcatccccaacctggcattctgcccagatctctgctgggaagcagcaggctgcgctgttccaggcagtgactttttcagatggaaggaacgaagacccactgtattcagtggattggtttagggatgctccaggcagggaaccacccggcaccctggcagtccatccagagggcctcctggaacttgtcctcagacctgggaagccaacgggagtgacaatagtctagggctcttggcgctgaggatctgctccatcctcatgtccatcctgctccttcctctcccttggccctggcttgcacatagcctgacatggtggctcagcagccccagaatccatgaagccatcatctcagactcctgcagttgattagaactttcccttggcttccttcggtcactctcagaaggccactctggctgtagttgaatgttctgtgggtcagatgttcacctgggtctcatcagctgcctgttcaggagaggggtgcagggcaggtccctttaactatattcagtcagtcagtatatttatggggcacctaccaggtgccaggcacggttctaggcactggggaagtgacagtgaacgacagaaatccctgctccccactcctaccactaatattcaggccaacgactgggagaacctctacctgtgccaagaggatccctaaggggtgtggctgctcctcagtctaaatcagtttgtattccctgaacaaactgaatggcaatgtaggagaaagacctagatagccccagagaggaagagagagaggaggtgggaggggaggggaggggaggggaaaataacacatgatagctatctttactgtttattgaacacctactgtgtgcaccttttacaagcagtgtctcattcacatctcacaatggcctaggaggttggtgctattccctgcccatttctgggatgaggaacctggcaccaaggtcacatatgtgcagtggggaagctgagatttgaacccaggctggctgactccaaagcctgtgctttgagactgttctggaggtggctgataagagtagagtttcaaaatctctttaaaccttcctaaagcaatgattgttttatgtttaaagctatttctagtatgaggaaaaaaagtgatttggcaatagacgtcaagagtctttaaaatgttccttctccctgattctgtcatctgcttctgaaatcttgtcctaaggacataatttaaagtttaggaaactactttctgcacaaaaaatgtcctcagtgctatttagtaatagtgaaaacctggaaatgacccaaatgtatagcaacagaggtgagacgtccactccagtctcaccccatcacagcagtgtctacggggactatatgatgtgacaaatgcctctgctattattagtgaacaaaaagagaacaccaagttgaatatatgatcccagctgtttcaggaaaaggacccccaaaccctgtgtatagaaaaagattataaagggctgggcacggtggcccacacctttaatcccagcactttgggaggccgaggcgtgtggatcatgaggtcaagagatggagaccatcctggccaaccaacatagtaaaaccccgtctctactaaaaatacaaaaattagctgggcatagtggcacacgcctatagctactcaggaggctgaggcagaagaatcgcttgaaccggggaggtggaggttgcagtgagccgagatcgagccactgcactccagcccaggcaacagagcaagactctgtctcaaaaaacaaacaaacaaacaaaaaaaaaaaaaagaaaagaaaaaaaaagaaaaagattgtaaaggaatacccaggatatcaacagtggtctctgagtggtgtgacaagaagtgattttctttttaattttcaagttttggtgttttccaaattttctttatgagttcacagtattttggtaataaaacaacatttattattgagaaaaataaaccacatcctggggccccctacccatggaggcctccgggcacccccagccacgttttcagcctgcccctctgtcttctgcctcccagggaccgcagatgttcatggactgcagcccacaggccctgcccatcgcatcagaggacaccacggggcagcatgaccaccacttcttagaccccaactgccacatctgcaagggtgggaggggacacgggaggggtgcaggggtggcagccaggctggggctgagcgtgcagttcagcagcaacagggatttgtggcctggggagagggtggcagagcaggggtgcccgtgccccaggtcacctagaaaagaacctggttcaaccctggctctaaagccctgggctggcttcagcgctgctgctgcccctgtttcagctcctgcctctgctatttgcagactgggagccctcgaatgagctgctaggctccttcgaagccgccaagagctgcggggacaatatcttccagaaagccctaagccaaactcctatgcctgctccagagatgcccaaaaccagggagttgtctcccacggaaccacaggacaggtgtggggttgggagcagggaggtggataacccagcagggttgagggggaggccaccacctggtgcaacagacatagcactggcttttcctgtgtggccttgggcaagtcttccctcccttgggaacctcactttccccatctgtgcaatggaactaatcatcccagcctcctggcagccccctgcacaaggccaagcttgggccagtgttccagtccccacagtagggacacaggatctgctctgaaaagaaaggaggtgccggggaagtcctcatggcctgctctgtctggccctgtcttctgtccctccctctagggtccctccatctgggctccatgtgcctgctgcacccacaaaggccctgccctgcctgccaccctgggaaggtgttctggacatgttctccatcaagcggttccgggccagggcccagctggtctcgggacacagctgtcggcttgtccaggtgcacctgccctcctcgccagggattcccttacacactgaccagcccaggcagcctctctctctctctctctttcactcatgcattctaaaacaattcatgggcacccctttctgtgcctggccctgtgcagggcatgggggcaaatgagatgttggtcccattcctacagagacaaacagggtgaaggactccctgtcacccatagcaagaagggcccaaaggagggttttaggagtgatcgttgagtgacttaatgatcagctaaagtgtcggatgagagcagaggatagaggagggagggaggggctttggagaagttgtagattagccagtacaggctgcagacctccatggggcaattagagctttctgggcagccactgagggtcctggaacactgcctgcccatatttgccacaggctgcagccttccaggtggctgggaatgcgtccaccctgagtgggtgggaagctggggagctgactggccatccttcctgcccctaggctctgcccaccgtgatccgctcggcaggctgcatcccctccaacattgtctgggaccttctggccagcatctgcccagccaaggccaaggtacctgcccactcttgggcaccccctcttttcctagtaccttactcccacctccctctccacttctagagcagaggcctggcttggatatctgggtctagttcccagagtgactgcagactcactgtgtgaccctggacaggtccctctgtttcctcctctggaagatggagacatactttctcacggggttctcaggggtttcagggagcccaggggtgttggcaggagcagaggatgactgcgcttacagctgctctcctcctgccaccgcaggacgtctgcgtggtcagactgtgcccacatggggcccgggacacccagaactgccgcctgctctactcatacctcaatgataggcagcgccacgggctggcctctgtggagcacatggggatggtcctgctgcccctgcctgccttccagcccctgcccaccaggctgcgccctttggggggcccaggtgagtgcctagtccccataccagaccctgcctctgctcacttggtgaccagaccaggcacggttgacacagtcacccagtagaggcaggcacatctcagaagggaactcctcacccagccaggcaaatgtgagtacaatgacagtaatagctcacgcttggatatcatgaactgcatgccagccattgttctaaaagctttacctagatgaattcttgtagtctcatcaccctatgagaatggtactattagactagactgtccatctcatagaagaagaatctgagggaggaagaaggcaaatgacttgtccaaagtcacacagtcagtcaacagcagaactgggcttcactctgttcacacgttgtgtgaagcacaacatggcttcagaaacctggcccctaaccaccacaccacactgcctctcaaggtaggcacccctgaagagaaactccagggacagccacatttgacccaggcagcaggacagagtcaggacctacacacacttgactgtaaatgtcacctcagagaggagggagggatgtttcgccacagccacggggggccgagctcggcctctgtgcatggacaccctccacggcgtggctcaggaaagcagcgaggttggcagtgggcgctttgcccactcctgagcaaagcgcttggccttttggggctccatgtcctgagacaatgaggtagactttgagtctgtagagtcttcaggtcaaacaatccataccccagcctcagccagataagccttgatcccgcagagctcaaatcttccgagacagccccaccttcctacttacttttcccagcatctcatgggccccatctcactgtgaagaagcccttcctgggatgtaggctccagatctgctgcagctaagctgaacacagttcttccccgcaggcctttgggctcttcctgtctcccctctcctttccccaggtctggaggtcactcactcaagtctgttgctggctgtgctgctccccaaggaagggcttccagacacagcagggtccagcccctggttggggaaggttcaaaagatggtctccttcaacagtaaggtggagaagagatactatcagccagatgacaggaggccgaatgtgcccctgaagggcacccctcccccaggaggtgcctggcagcagagccagggcaggggcagtatagctccaaggggaatctctgcttggcagaggccccccagaggcagggggaggctctggccagagcctgaaaactggcagcatcctgggcgagggcagtggcccccagagccaggcttgcgccagtcccagcatccctattcagtagcaccagctggtcatggctttggccgtggccagcacttccacagggactcctgtccccaccaagccctgctccggcacctcgaatccctggcgaccatgagtcaccagctccaagccttactgtgcccccagaccaagagctccatcccccgccctctgcagcgtttgtctagcgcccttgcagctccagagccccctggcccagcccgtgactcctctttggggcctacagatgaagctggctctgagtgtcccttccctagaaaggcctgaccctccttacccaccagaacaggggttttgatgccctcactagtgttgaagcctgttccagagagaggtgggactgcaaggagaggatggtcagccctacccacctgccctgtttgaacttcctgtttgacaatgtttgctgttgattttttgttcaataaagaatttggtaaaattggga

SEQ ID NO: 41 - RNA, 3979 nt, Homo sapiens
agcaagggccucccucccccgcaucacgugaucucagcuccuuuucagcuaguggguggaaccccaggagggaaaacucagggaagcccagggcccguguugugcuuuuggcccagguagguggacagacaugucccaggcgggggacguagaaggccccagcacaggagacccugugcucaguccccaacacaacugugagcuuuuacagaacauggaaggagccagcuccaugccaggccugucaccagaugggccgggagcaagcucugggcccggagucagggcuggcagcagaaggaagauccccaggaaggaggcccuucgagguggcagcucccgggcugcaggugcugcugagguccggccaggggucuuggagcugcuagcugugguacagagccggggcucgaugcuggcuccugggcuccacaugcagcugcccucggugccuacucaggggagagcucugaccuccaagaggcuccagguuucucugugugacaucuuagaugacaguugccccaggaaacuuuguagcaggucugcuggccucccagagagagcucuggccugcagggagaggcuugcaggaguggaggaggugagcugccucaggcccagggaggccagagacgguggaaugaguucuccagggugugacagaagaagccccacacucagcaaagaggagcccccuggaaggccccugacauccucaccagacccagucccugugaggguaagaaagaaauggaggaggcaaggggcucauucagagugugaggaaggggcuggugacuuccuguggcuugaucagagcccucguggggacaaccuccugucugugggagacccuccccaaguugcugaccuggaguccuugggaggcccuugcagaccucccucuccaaaagacacugggucugggccuggagagccagguggaaguggggcaggaugugccucagggacugagaaauuuggauauuugcccgcuacaggggaugggccccagccaggcagccccuguggcccugucggguucccagugcccaguggaggggagucccucaguucagcugcacaggcuccuccacagagcgcagcacugugccugggggcgucagcacaggccucugcagagcagcaagaagcugugugugucgugcggacuggcagcgaugaaggccaggcuccagcacaggaccaggaggagcuggaggccaaggcucagccagcuuccaggggaaggcuggagcaaggacucgcugcccccgcugacaccugugccagcucccgggagcccuugggcggccucagcuccucccuggauacugaagccagcagggccugcucaggcccauucauggagcagagaagauccaagggcacuaagaaccugaagaaagguccagugcccugugcccaagaccggggcacagacagaagcucagacaacucccaccaggacaggccagaggaacccagcccaggaggcugccccagacuggaggaagugaaaauaccccauggagugaagcuugugugcuaccuggguuccgggccagugauccagcuccugggggccaucagccacggccaggcaggggggcagcugccaccaaagcuggagguucuagaggacuugauggaggucagcucacccucaccugcccagaggcucagaaggaagaaaaggcccauggugcagggcccugcugggugccagguuuuccagccuucuccuucaggaggcacagcaggggacccugguggccucucugaccccuucuacccuccaagaagcgguucccuggcccuuggcgaccccagcucggacccugcauguucccagaguggcccaauggaggcugaagaggauucucuuccggagcagccagaggacucagcucagcuccaacaggagaagccaucccuguauauuggggugcggggcacuguuguccguuccaugcaggagguacuauggacucgccuucgggagcucccagacccagugcugagugaggaggugguggagggcauugcugcuggcauugaggcagcccucugggaccugacacaaggcaccaauggccgguacaagaccaaguaucgcagccugcuguucaaccugcgggaccccaggaaccuggacuuguuucucaaagugguucauggagaugucacccccuacgaccuggugcggaugagcucgaugcagcuggccccccaggagcuggcccgcuggcgggaccaggaggagaaaaggggccugaauaucauugagcagcaacagaaggagccgugcagacuuccagccuccaaaaugacccacaagggcgaaguggagauucagcgggacauggaccagacacugacccuggaggaucuggugggaccgcagauguucauggacugcagcccacaggcccugcccaucgcaucagaggacaccacggggcagcaugaccaccacuucuuagaccccaacugccacaucugcaaggacugggagcccucgaaugagcugcuaggcuccuucgaagccgccaagagcugcggggacaauaucuuccagaaagcccuaagccaaacuccuaugccugcuccagagaugcccaaaaccagggaguugucucccacggaaccacaggacagggucccuccaucugggcuccaugugccugcugcacccacaaaggcccugcccugccugccacccugggaagguguucuggacauguucuccaucaagcgguuccgggccagggcccagcuggucucgggacacagcugucggcuuguccaggcucugcccaccgugauccgcucggcaggcugcauccccuccaacauugucugggaccuucuggccagcaucugcccagccaaggccaaggacgucugcguggucagacugugcccacauggggcccgggacacccagaacugccgccugcucuacucauaccucaaugauaggcagcgccacgggcuggccucuguggagcacauggggaugguccugcugccccugccugccuuccagccccugcccaccaggcugcgcccuuuggggggcccaggccuuugggcucuuccugucuccccucuccuuuccccaggucuggaggucacucacucaagucuguugcuggcugugcugcuccccaaggaagggcuuccagacacagcaggguccagccccugguuggggaagguucaaaagauggucuccuucaacaguaagguggagaagagauacuaucagccagaugacaggaggccgaaugugccccugaagggcaccccucccccaggaggugccuggcagcagagccagggcaggggcaguauagcuccaaggggaaucucugcuuggcagaggccccccagaggcagggggaggcucuggccagagccugaaaacuggcagcauccugggcgagggcaguggcccccagagccaggcuugcgccagucccagcaucccuauucaguagcaccagcuggucauggcuuuggccguggccagcacuuccacagggacuccuguccccaccaagcccugcuccggcaccucgaaucccuggcgaccaugagucaccagcuccaagccuuacugugcccccagaccaagagcuccaucccccgcccucugcagcguuugucuagcgcccuugcagcuccagagcccccuggcccagcccgugacuccucuuuggggccuacagaugaagcuggcucugagugucccuucccuagaaaggccugacccuccuuacccaccagaacagggguuuugaugcccucacuaguguugaagccuguuccagagagaggugggacugcaaggagaggauggucagcccuacccaccugcccuguuugaacuuccuguuugacaauguuugcuguugauuuuuuguucaauaaagaauuugguaaaauugggaaaaaaaaaaaaaaaaaa

SEQ ID NO: 42 - protein, 1216 aa, Homo sapiens
MSQAGDVEGPSTGDPVLSPQHNCELLQNMEGASSMPGLSPDGPGASSGPGVRAGSRRKIPRKEALRGGSSRAAGAAEVRPGVLELLAVVQSRGSMLAPGLHMQLPSVPTQGRALTSKRLQVSLCDILDDSCPRKLCSRSAGLPERALACRERLAGVEEVSCLRPREARDGGMSSPGCDRRSPTLSKEEPPGRPLTSSPDPVPVRVRKKWRRQGAHSECEEGAGDFLWLDQSPRGDNLLSVGDPPQVADLESLGGPCRPPSPKDTGSGPGEPGGSGAGCASGTEKFGYLPATGDGPQPGSPCGPVGFPVPSGGESLSSAAQAPPQSAALCLGASAQASAEQQEAVCVVRTGSDEGQAPAQDQEELEAKAQPASRGRLEQGLAAPADTCASSREPLGGLSSSLDTEASRACSGPFMEQRRSKGTKNLKKGPVPCAQDRGTDRSSDNSHQDRPEEPSPGGCPRLEEVKIPHGVKLVCYLGSGPVIQLLGAISHGQAGGQLPPKLEVLEDLMEVSSPSPAQRLRRKKRPMVQGPAGCQVFQPSPSGGTAGDPGGLSDPFYPPRSGSLALGDPSSDPACSQSGPMEAEEDSLPEQPEDSAQLQQEKPSLYIGVRGTVVRSMQEVLWTRLRELPDPVLSEEVVEGIAAGIEAALWDLTQGTNGRYKTKYRSLLFNLRDPRNLDLFLKVVHGDVTPYDLVRMSSMQLAPQELARWRDQEEKRGLNIIEQQQKEPCRLPASKMTHKGEVEIQRDMDQTLTLEDLVGPQMFMDCSPQALPIASEDTTGQHDHHFLDPNCHICKDWEPSNELLGSFEAAKSCGDNIFQKALSQTPMPAPEMPKTRELSPTEPQDRVPPSGLHVPAAPTKALPCLPPWEGVLDMFSIKRFRARAQLVSGHSCRLVQALPTVIRSAGCIPSNIVWDLLASICPAKAKDVCVVRLCPHGARDTQNCRLLYSYLNDRQRHGLASVEHMGMVLLPLPAFQPLPTRLRPLGGPGLWALPVSPLLSPGLEVTHSSLLLAVLLPKEGLPDTAGSSPWLGKVQKMVSFNSKVEKRYYQPDDRRPNVPLKGTPPPGGAWQQSQGRGSIAPRGISAWQRPPRGRGRLWPEPENWQHPGRGQWPPEPGLRQSQHPYSVAPAGHGFGRGQHFHRDSCPHQALLRHLESLATMSHQLQALLCPQTKSSIPRPLQRLSSALAAPEPPGPARDSSLGPTDEAGSECPFPRKA

SEQ ID NO: 43 - DNA, 37273 bp, Homo sapiens
tcctttctcctccggacttcagtttggcggcatctctgtcttagcgagaggggctgtgactaaaagctgccttttctcaatgaactgccagtttgtaagagcctccgggtcccctcaaaccgcctcgagcgcccctctccgcgagagctgcgcggccggaactgcgccggcgtgacgtcactgacctcgtcgggttcacttccggcgctcgcaccgccccgctctccagccaaggctccgggctgaggcatttgcttggctgcagcctccttccgacctgcccggcgggacccaggggaccaagccgagccgagccgcggggcccgctccagcccggccatgagcgcggccgcatgatgcgtccctgcctcggccgctgcagtcgccgccgccgccgccgcaggccgggaggagccgcagcgccgggcgaccccgcccgggcctcgggtgagtgcggcgggctgggccgggcgggctgctcactcccgggtctcccggccacttctggcccccggcgtgccctgtccttccgtcggttccgccgctctgtctccaccccgccgcacacctgcgaccttctggagttcctaggggcacctccgtgcccgcacctgacttcccttccaggtgcccccttgtcattccttagttgctctctcgggatagggcccggattgcagccccagctttttgcctgaccttgggcgtgacactcagctctccgagccctggttttctgtgtggctaatgacggggtggtggttacagagcagctataaaccctgtgtaagctgtaaagagttttttaataggcaggtattacaatgagcagtctcgcacttcgcgttgtggcttctcttcctcttaagctgtaaacttttctcttttattctctgcccatcttcctagttatcttccctcctgctccacgtcagtcatctttgggtgttagttgcctgaaagggcatctgggacagtaaagctttcagggcagtaaggctcacctctcctggtgtggttccttctacaactttgtcacactcagttagatagacacactttattagcttatgaagaaccagtttattgtggccgttaaattggagtgtaagagacagtgttgatgcggctacctgccttgtagcttcttttactgtctgggctgtatacagtgctgggcaaatcgctgctacagtgttgcattttcagtctgcttagtgtatgcacttaagcgcacgtatttatctattttactgttactatcccaaggggtttagagatttaggtcaatgtgtattaatatttctttctgaactcttcatctcacagatgaagaatctcttttttgttatgttttacagtgtttacatacctgaaatcaccttttagtcactttgtggcctggtacgcacgcggtggctcgtggctcatgcctgtaatcccagcgctttgggaggctgaggcaggaggatcacttgagcccaggagttggagagcagcctgggcaacatagtgagatccccttctctacaaaaaaattaaaaaattagccggatatggtggtacacgcctgaggtctcagctgcttgggaggctgaggtggggggatcacttgagtttgagatcatgccacagcactgcagcctgggcaacagagtgagatccccatctcaaaaaaaaaaaaaaagtcactttgttaaattcgcttgttaaaagtcagaacttggccaggcacagtggctcatgcctgtgatcccagcactttgggaggccgaggcgggcggatcacgaagtcgggagatcgagaccatcctggctaacacggtgaaaccccatgtctactaaaaataccaaaaattagctgggcatggtggtgggcgcctgtagtcccagctactcgggaggctaaggcaagagaatcacgtgaacccgggaggcggagcttgcagtgagccaagatcgcgccactgcactccagtctgggcgacagagcaagactccgtctcaaaaaaaaaaaaaaaaagaaaaaaagtcagaacttggttaaagtgaaaggctcttgggatatttgaaatatggaatggaactgaaatattaactaaattgcaattcttgaacattctggaaaataggttaggggcccacattggcttctgatttgagagttgaaggagaagaagactatttgaaaaggtaattcccaaaggattcgctaagtaacaatgggaactcttctgctaccattggctcagagcctgcctcagttgacagattaatgaattgaaactttacagccctgctaatcaatgaactgtaaaaacaaatcctcttcaagaacagaagagtattagcatgaatagaatggccctctcagtgagaaagaaagcactgaaatgaactttatataagaacaatcttgattcagtcaaaagtatgaacgtacttttacattcttactgaaacttacctgctggcttggatgctttgttgatataaataatacaatctttgttaaattaacaaagaaaatgggtgtagaaataagttcatgtagaaagttaatgtttgggatgaacattgaatagttttcgtgattggacaactatacaagataattttactaaagcagctttttggggtatgtttctgtaatattttaactttagaagtactttttttttttttttgagacggagtttcgctcttgttgcccaggctggagtgcagtggctcgatcttggctccctgcagcctctacctcctgggttaaagcgattctcctgcctcagcctcccgagtagctgggattacaggcctgagccaccgtggctggctaattttgtatttttagtagagacaggatttctccatgttggtcaggctggtctccaactcctgacctctggtgatccgcctgcctcagcctcccagaatggtgggattacaggcgtgagccactgtgcctgaccctttttttttttcttcaaaccctagagcagaacataaagtcaaaactgtcattttcactgaaatatcttattcccaaagttagtctccagggtcagtgttaacaacttgctgtgtgacccttcggttgtaacatctgagaagagtttagctggactgtgccagttagctagctataaagttgagtgggaatagtgccagtccacacaggactgccctcacttgtgataccaactgcaagttggcttttttttgggggggggtgtaggtggtggttcccaaaaccacccttgggtggagtccagggaagtaccagatggggaagcaccaaaggcacgattgtcctctccctgtggactcagaacacgttacttttttggcattgatgtgtgacagtatgcatggagtattgccagcctgggaagctcacctgagtctttgtagtcagtttttattgaggccccattatgcaggcatgattgattgattgattgattgcccacatggttgatattagttcccagatagactgataccctgtgacgaagagctcccccctcaccctacatcatattgttagctgaggacaaagggcagacctctttttgggtaagattaaataaggttaaattgttttttgtttgtttgctttgagagggtcttgctcttttgcccaggctggagtgcggtggcacaatcatggctcactacagccttgatctcctgggctcaagtggtttcttctacctcagcctcctggttaacagggaccacaggtgtacgccaccctgtccggcttattttttgtagagatagggtctcactatgatacccaggctggtctgaaacccctgggcccaagcaatccacctgccttggccgcccggaggcatgttatactgtgcctggcctggttaaattatttactacatatcctacttctttcctggtcccttcctacttgaaaatcctgtatactactgtgctttgccattgacaaatgactgtcccttctagaacatggaggagacacaggccacagggagagctctcaaccttagttcccttttaactaaaatgtcttcgaatatccatcagtcattttcttctgctttgcctctgaggaagagacagtccctccttcctgatgttaacgcttgtgtctgctttggtctgcttgttatgggactgtgaattatcatttactatctcttgcctttttgattgttttttccatttgctggtttcttcacttctatttacaaacatatccttgtcttagtaatcttggccctgcttgcttctgagttccattccattccattctttttttttttttttttgagatggagtatcgctctgttgcccaggctggagtgcggtggcgtggtctcggctcactgcaacctccgcctcccaggttcaagcggttctcctgcctcagcctcccgagtagctgggattacaggcacccaccatcatgcccggctaatttttgtatttttgtagagacgggtttttaccatgttggccaggctgatcttgaactcctgacctcaggtgatccacctgccttggcctcccaaagtgctgggattacaggcatgagccaccttgcccagcctccattccattcttgaaaaacttttcagtagaatcctattaatcctctaatcaaacccagactccatatggggcccagacaatgccttattttggttcagcatcttacggttttgaaaacaccgtgttcttctacggtgtcttataggtagtgggtgcttgaaaactgtttggtgaatgaataatttggcaaggcagagaaagaattctaattggaggaaacaggagcaaaaccacagagctatgaaaggcgaggtaaggggaatccaaaggagcaccatatggaagagagtggggaatgttgagcctggaaaggttgggagagccagaaggtttcgcaacaggttgattttgtgacctgtgctgtggttttgttttatttaattttttattattactatttttgagacggtgttattctgtcacctaggctggagtgcagtagcatgatctcaacttactgcagcctcaacctcctgggctgaagcgatcctcccaccttagcctcctgagtagctggggctacaggtgcatgccactgaaactggctcctttttttttaaattacagaaatggggtcaggccggttgctcaggcctgtcttgaactccatgttgctcaggctggtcttgaactcctgagatcaaatgatctgcccacctcagcctcctaaagtgccgggattacaggtagaccggtgccactgcacctggccctatatattattttaaaattatttaattttatttttcaaggaatttttatttaggtttttaatttttttgagacagggtctctctctgttactcaggctggagtacagtgatgcagtcatagctcactgcagccttgaacgcctgggctcaagtaatcctcctgcctcagcctctcgagtagctgggactacagctgtgtaccactgcgcccagctaattaaaaaattttttttgtagagatagggtctcgctatgttgcccaggctggtcttttaactcaagtgttcctcctgcctttgcctctcaaagcactgggattacaagtgtgagccgccacctctggcctgtgctgtgattttgaacggtgattcctgcagccatgtggagagtcattggaatctagtgacccttgaagttagcgttctgcagaggtacaggctagagatgagggctgcctaaatttgggttgtgggaaaggtgagaaggatcagagctgtaagtgggaagtgtcgtcatacatgtaggaatggaggaattttgtgtccagaggctaaaaggtggtgaatcaatcctggttgcatgaggaatgtcactgatttggaaaaagacgctagctctatgttaagctggtggtttggttcaccgggaaacactgccgttcatttgcagcactgcgtgaggaggggcagtcagctagagaggcttccagtctcattggagaccagcttttagagttcactgaaatgttttgaattcttagattccatatttccaacattcaatttattcattacagaatgcactttcttaaactgagtgctctggaagccagtgtattttagtggaagaacacgggctttggaatcaaaacagttctgactccaccctaactggctgtggatctgagcaaggcacttagcctctaagactcaattttgtcatcctgaaaatgagctcgtgatacgcctggcttttagggtggtggtcacgtgtgtaaatctcctgacaaacagagtagatgctcagtaaatagcctttcttctcaccttcaaatgttttatgttgtcattaacttgtaattgagggctaaatgtattgttagcatgtcatattttcttagtattttgaactctggttaatctggcattataaaagctcattttgtattaaacagggaaactctaggaagacagggaaggaggttgggaataccagcctgattgaggctctgctcttccctgggacaggatgcttaatgaggtttggaactctagagttctttttatttctggatttagatttcttgagggtttagttaccatgctgggatttttaaaaatagctgctccatttgactgtcaaagttaggttgtggctctcgtacagggatgaaaggggaacctttggggtacgagtaagcattccttggaggccacctcatctggcctgcgtgctctagtgaggtcccgcgcacatgttttctggacctgaagttgtgacttgcctacaggtggggtttttctcttcacccccgtctccctctttctctataacccttgtgcatttctcttctactccttttctgccaggctcctttgggcctctggcccactcccctggcagatcttatcacacgcccctgtcgtttgcctgtggacttcctttctactttttcttgtctccctcaagcaccctccttcccttacttattcactcaagaaatgtttgtggagtgcgtggtgaacccgggagtgctggggatactatgagtaacattccattgaggtgatggcagaacaagcagccagggagaggctgctaggaagggaggccagcaggctccagatggagtggggctttctaggccatggtggtggggtggagtggggggtggggtgggattttattcgcactgaaaaggcagtgattgcatgagcttagggaggggagtgacatgatctgatttacgtctgtggaagaccactctgggtgctgcatgggggactggactgttgggtgagcagaggcatgagagtagagagaggactggtcagcaggtgatctaagcactccccaggtgagagctcatgggaccttggtctgggcgggtgaggaggtgggagaagtggtcggatttggggtaggtttagaggtgcaccccataggacttgctgatcagctagatgtggagaggtggggaatgagatacatgaagggcggggcctttttttttgggtgtggtgtgccgttgattgagatgggaaagagtggggtcgtgactgagtgggggaggttctgctttgaccctcctgccctggagttgttaagtggccagttggatagacgcccttagggatgcatcgtcagcctgagagttttccagatatctttttttgtttaaacttcgtgaaactgaggttccccattagctcctttgtggagagcatgtagatgaagggaaggccgaggactaagcccgggtgctcccggcgtttacatgggtggaggagaagtatccagtcagagaccgggtgtggctagggggaagggaagtcagtgttgtcccccaggcccctcactcctgagactggtgttccctctcccacttccacggttcattgtgtgctgtgtgtgttcccccactttgccatgtttttgatctgcagtgttctgatcctactgtagagtgattaagtattttaatatgaaatgcccttctagaaaggtcaggcaatgtcactattcaccgtatgacttacgtgccagcatatcattgagatctggcttgagttgggttaatattctggtgtggattttttttttccttaaaagtaatattctgatctttggattcagtaatttgagtagaaaatcatggtttcttagagcatcatttcctatggtaggatttgaaaggacaaactgaatatttcatgattgccagttgatggcaagagcacttaggagcgcagtcgccatcagctcactgcagtgggtcagctgagtgctgcgctccttttgtgagttgagggaggacgtgagctccctctgtagccttccccaccttgactcaggttccctgactcatccgggctggtggcatacctgggatgtggccccgtttgcacggcccataggaaccactgcctccggatcttacagcgcccccctggacccagcctcagtcctgcccctcacttcctctgagtctgtttctcaggctcctcgggccctcagtgccctgagtttcggtcacttggcttaccaggcctctcctcctgccccctggactctgaggttggcctctcccgcttgcatcttggtcttgccttcgttactctgcttttctagcccatcatcctggctaatctccagccctgggtaagtttatggtgctgggctgggcttttggataaaaggaccagccattcccatcctctatgagacacttaaggtgtcagcattgtctgggccctgcagggtgacagttcaggcccctcttggccgccgcctctccaccccatttccattttgcggtctccataggccctcccagcgccgcagccccgctcctcctctctgctgagacactcagcactcgtcttcctgagtgaactgctttcacttctcttcatgcccgggtttcccctttcttcctccagggaggaaggatcattccgctttgtcgaccatccccccactccacccacgctttctcctatcgataaaattcacacttgattcagatttcctcagcttttccttaatgtcctttctctgtcccaggatcccacccaggatcacacaggacatgagtgggcacatctcgtcagcccctcttggctgtggtgctttctcaggcgttccttgtttggatgactggcacttgggagcagtgctgtgggtcagggatttttttgtaggatgctcttctcttgggacttgtttgatattttccttatgactagacttgggtgatgcagttagagggcctgtctcgccacagcctgtcaaggctgtgttctgtccacaggactcattgctatggatgtggccttgaacacctggctgactgaggtggtgtttgccaagtttctcctcagtaaagttattttcctcctttccgtactccactcgttagaaactgtccctgtgaacggccatacttgaggggtggggagcagcgtcctccctgctggaggaggaggagccacaggcattcctcggactcgtggcgctgggtatttgtctattttctgtttattcagccactgctttatatcagtctggactcgtgcatgtttacttgatgcttcgggttataaagcaatactattttattttcctggaaaaagctttggccattgggagctcttttacttggttcctatatccctttcatgagcccacctgtccccatgattgtgtgtgtgtattgtgaacacttcattattctctggcaatacaagatgctccaagctcatcttgtatatatatttattttttttgcctcagtcctggttccttttatttattagagaatggtattaaaaaccaagatctgtggtggctcacacctataatcccagcactttggccgacatgggaagatcgcttgagtccaggaattcaagagcagcctgggcaactagcaagatcccatcttgaatattaaacaacaacaacaaaccaagatctgggaattaggtgtgctggtggctgttggtgtgttgcttctaggccgtctcagctgacagagcaagtaaatatatgtgtggatgctaacccatgtgtgtatacatatctgtagatatttccatatgcaactgcttgtatcttccttaaaccaaaaacttaggtcattctagcttcctcctcttgcttacctggaaacttccaccccaacagtgagaagcctggctcttgccatccatttacttaattttttttttttttgagacagggtcttgctctcttgcccaggctggagtgcagtggtgcgatcttggcccactgcaacctcagcctccagggttcaagtgattttcctgcctcagctgcccaagtagctaggattacaggtactggccaccatgcctggctaatttttgtatttttagtagagacggggtttcgccgtgttggctaggctggtcttgaactcctgacctcaagtgatccacccaccttggcctcccaaagtgctgggattacgggcatgaggcaccgcgcccggccccagttatcttttaaaccatctggtttacctaaggtctggtgcctcccattccagcagagtgaagtctagagttccaggtttcttagcgtggcattcaggctgtggttccattggacctcaggcttgtccttctggtcacattcccctctggaatgctgaattcccttctgtgctgtgtcacatgattgtcctctcttgtccatgtctttctggtctgctggggcccacccatgctgtctgttgtctttattgacactttctctggttcttccagaagtagctgttttcatttctctccctgatcacactttgctgctaacttggggaaagcactttgcacattggatcctcacctcgctgctgtgtgcgctctgctcctgtggctcaggctgtctttggctgcacatccttgaggccttgcacagagtacgtgcttggatgctcaccccccaactccccagcctgatgtttgaattgagtggactgttcatggcaggggttgagtttgttttgtaaccttctgtcctaaaacaggtttgcttaattccgttttttatggggctgaagtgggtgtatgaacagtaaagcaacgacaagtttaaatagtattttaatataaacatggataccagactctagggtggacattcttagcagtgcagtggtaaaaataattatgtcttggttcttttctgtagtcactgatcaccagagaatactggtatcttttgtttacttgttttcagtgtgttcctgagaaatacattttctgtttatagccaaggaaaaaagtaaaggcgaagagcttaagacacttgcttgaagttacagatacaagtaaatccaagacagggtctggactcaggaacgcgggttatccaggaagaaaagtgactccactgctcgctgggacttgccttgtgccgcacccttgcactatcacaccggccgtacatacctgtgctgggtattttttctcctgctcatgtttttaattgaggcatgattaatgtacagtgaaatgcacaattttattttattttattttagagacagggtcttgcttgttgcccaggctggagtgcagtggcacaaacacagctcactgcagcctcgacctccgagactcaagcgatcctcctgcctcagcctcctgagcagctgggagtacaggccctgcccagccaatttttaaaaaattttttttgtagagacagggtcttgccatgttgcccagattagtcttgaactcttgggcttaagtgatcctgccttggactcccaaagcactgggattacaggtatgagccactgtgcccggccccacaatttaaagtgtatagtctattgggctttttttaaacagcgaattgtattttgttttgacaaacgcatatgcctgtgtcacccacttccctctcaagatacaggcatgtctgtcaacttacaatgttaccttggccctctccacagtcacttctacttgtgctcaaatccttattctgatttctttctaaataaacgagtttgcctcatttagaatatcatacacatagaatcacactatatattcttccgtgtctggcttctttcacttagcataatatttttgagatttagccatgttgcttgtatcagtaatattttcctgcttttttgctcagaagtatgccattatatgaatacaccaatgtttgttatctatttcctgttgacgggtttgggttgttttcagtttgggggtattatgaacaaagctgctgtgaacagtatcggacaagtttttgtgttcatatttatatttatttttcttgggtaaatacctggaagtggaatctctgagtcacagggtaggtatttgtttaactttgagaaagtgccagactgctttccaaagtggttactttttaaaatttataaaattaattggagatttgatctcattgtagaaaatctggtgtagacctgatgcttgcgattcacagtcctgaattttgcaaaccagtttccgattttaagacattgctaagataagctcattggaaaacagttcaaaatattactaagcatttcaagtttctggctggtgcatagatgtttgaataaagttactatatataaatgctgcatttaggctgggcacggtggctcacgcctctaatcccagcactttgggaggctgaggcgggcggatcacctgaggtcaggagttcgagaccagcctggctaacatggtgaaaccctgtttctactaaaaatacaaaaaattagctgggagtggtggcgtgcacctgtaatcccagctactcgggaggctgaggcaagagaattgcttgaaccccagaggcggaagttgcggtgagccgagatcgcgccactgcactccagcctgggcaaaggagtgagactccatctcaaaaaaaaaaaaaaaaaaaaaaggttcagaagggattgagagctggagctctgttggggaaccagtgctgtgtcagtgtttgtctagggcctgggcagaagcttgagggaaaagcgacccctgagggatcttgcagtcggtgtgatgggcacagggacctccacagagcgggcccaggtggaggcttggcacactagggcgggagacagcgagccatctcgggttatcgggaggcaccccagaatatgttttcagaaactagtcagggctcttggtttcagacaacagacagtagctgggggttgactcaggcagaaaaagcactgtcgtggaagcatctcagctacagatggagtggaggagccaggcagccggcgccgaagccagagccgaaacctaccacaaggagatctgcttgcgcccttttctcccagggacccctgtgctcaacctctgttgtttggaaggtggacctcctgacccgatcttctaatttttttttttttttttgagacagtctcgctctgtcacccaggctggagtgcagtggtgcgatctcggctcactgcaaactccgcctcccgggttcgcgccgttctcctgtctcagcctcccgagtagctgggactgcaggcgcccgccaccacgcccggctaatttttttttatttttagtagagacggggtttcaccgtgttagtagctaggttggtctcgatctcctgatctcgtgatccgcccgcctcggcctcccaaagtactgggattacagacccgatcttctaattttattttacattctcttctcagtgttttctctctgtcttctagttctcctctctgggacatttctatttttttttttttttttttttttagacggagtctcgctctgtcgcccaggctggatggagtgcagtggcgccatctcggcccactgcaagctccgcatcccgggttcatgccattctcctgcctcagcctcccgagtagctgggactacaggcgcccaccaccacgcctagctaatttttgtatttttagtagagacggggtttcactgttttagccaggatggtctcgatctcctgaccttgtgatccgcccacctcagcctcccaaagtgctggggttacaggcgtgagccactgtgcctggcccatttctactcttttgtccaattctgtttaagaatatttagaggccgggtgcgctgtctcacacctttaatcccagcactttgggaggccgaggcgggcggatcacgaggtcaggagatcgagaccattctggataacatggtgaaaccacgtctctactaaaaatacaaaagataattagctgggtgtggtggtgggcgcctgtagtcccagctactcaggaggctgaggcaggagaatggcgtgaacccgggaggtggagtttgcagtgagccgagactgcgccactgcactccagcctgggcgacagagcaagactccatctcaaaaaaaaaaaaaaaaaaaggaaaatttagaatctatagactgttgtattttcgttgtagaataaccaggaagttcttaaactgttcctctttttgtttcacagaaccaatctcttctcttattttgaagaatatgaattttacctatgccttgttgacattttcttctctgtgcattgtgcgtgttctggactcttacccttcatttctgttttgtgctctttcatgaatcgtgtttggatttaatttttttttttttttgagacagagtcttgctctgtcgcccaggctggagtgcagtggtgccatcttggcttactgcaacctccgcctcgtgggttcaagcagttctctgccacagcctcccgagtagctgggattacaagcgcccaccaccacgtccagctaatttttgtatttttagtagcgacggggtttcaccatcttggccaggctggtcttgaacttctgacctcatgatccacccgcctcagcctcccaaagtgctgggattacaggcgtgagccaccgcgcctggcctggactttctttttttataatggagctacgacaagcacttggaacctctgtgtccgtggcgggggtttccctgtggcccctgacttagggaggtctgacagtgaatctgaccttcttgttgggttttccctacatcgcagagtctttagacctttttcttgggtcatgttagtgccagagaggattcctcgaccctcccatctgtcagggttcggggagctacgtgggagatgcgtgccaggagtctctgctctcattgagtggccctcactgggttccactgtcttccttcacctcctcgcccctcccacagcagggcctgccattctagtccacccctcctgcctcaagtgctctgtctctctgttctgtgattcctttaatgtggccagtaaatcagcttatcgacggtagaagtgcaggctacccagatttggtctgccctaggggatttttctggagggattttagcttatagatctgtatttaacactggggctaaaagagcaggagggtaaatggaaatatttaaaataaattacttgatttccaggattgtgaatttacctagtaatcaaaacttagaagagcaatgatttcatacttaaggatagttctgagtgacagaacttgatgcgtcaaatgttacgctccaaaaattaatcataccctaagaaatatgacacacgtctgtcataaaataaatcactttttctaatcagattttattacctttcagatccgatcacataggacagtatgcaccttaagatcctgaagaaacggcacaaaatgttcaagtgatgtttagaaataacttgtgaggtaagagtgtgattatttagggtccaatcactgtttcctttctcacagctgacactagcttgtatattactaaaaaggtaacctgtgcatgtggcaaagcagaggcgtggtgccaagctgacaggcacgccttccttttcacccgctgccttccggtcctaaaaggagggtgtatctgtggaggggactccatgaattgaattgatgagttcttggccagtatcacaagatgaggggaataccccgctttccacctgaaatggaaagtggtttggttttttttgtctgttttttttgagatggagtctcagtctgttgcctaggctagagtgcaatggcgtgatcttggctctctgcgacctctgtctcccaggttcaagtgattcttctgcctcagcctccctagtagctgggattacaggcacccgccatcatgcccggctaatttttatatttttggtagagacggggtttcaccatgttggccaggctggtcttgaactcctgaccacaagtgatccactcgccttggcctcccaaagtgctgggattacaggcgtgagccactgtgcccggcctgaaacggaaagtttttgcttgtgtggttgtccctttaaatatggagatttgtagtgttgcttttggtgttctgggaaacagggctttatttaacatgccgagaaagagcttaggttcgggagtgttgagaaaatcccattaaatcggccattagggtagaagagtgatgctggggcatctgtgtgagagtgcccagtgtttcacggttccctcagaaactgtcttgagtatgaagtcaacggtggttttggaattcagtgcagaataaggctgtgcccttgctcctaaggaatgtgtacattttaataccgcatctcaaatggctgtgctgtttgcttttagattagcttccatgtaaaggaatggtttcttcatttcttcccctcccttcctgttgcattactcaagtgtaaatacagtgactcagagacacgagtgagtgcactgtgttactgagagctgtatttgtccagcctaactttgctatattcgtttgttgctttgttgaaaataaagcagtttttggatttcatgttattttcctgttgacttctaatggatcttacagatatggcactaaagccctcaagtatgatatgtcaccctaatatgtgcttataggaacgtcctgccatggccagtgtttggtgtctgtgggcgctctccttacacagctgtgcctgccatccgcacccccaggtcaggcatggagccacagcagcatcctgcactccgtggaggtcttaccaggacctgaaccaggaaggcggagctgagctggctcaggtgtcacatgtgtgcctttagaagactttcaagaggccctgctttctggagagagctcagactgcccaaacattgtgctctgacaaaagtatagcttgttttactgcctggaaagcacccttccttttctcatggaacgtgtcctattagagaagtcaccataaagcaaaatggttctgctcagaggaatttttcagcttacggccttgatgtacctgggcccacagataacgattcaccaagaaacttagatggaaatcagcaggaggtgattggaatctgagagagggactgcttgctttttgttgcatctgccttttagcaaacatgcccttgctgtgcgccagacagcatgcaaggcatgagggggacagggcaggaggagacccagacccccctggaggggctgacatcaggccgggaggtcggacctgcaagagctctcaggtagcaagtggtaagtacctgggagggagagctggtgagcgtgcccagggcttcagcggaggcagagaaacttccaggtactttctcagccccctgacagtcaggctttactagtagtgcaggcagaagcagtttcagcctttatctccggatagtcacatctgatgtctagagacctcttcgcaaagtgctcctcagaagaagagaactcccttttcaggttggcttgcctagaagagagaaaagttaggccctgcagggtgaatgaggtttatgtagaggcaatggtgctgcaaaggtgtttgcaggggatgttgagcagacagatgcagaagatgtaggttcagaaaatgctgaaggaatggttggctaaggggtctgtccaaattcttttgatctttagttttttctatttcactcaaatgattatttttaaaagtttttttaattaaaacaatttttttgacattgggtcttacttactctgttgcccaggctggactgcagtggtgggattgtggctcactgtagcctcaacctgccagtctcatgcgatccttccacgtcagtcccccaaacagctgggactataggtgtgtgccaccatgcctgactataaaaaaaaaaaacaattttgttttgtagagattgggtcttcccatgttgcgcaggccagtctcaaactcctgggctcaagagatcctcccaccttggcctcctaaagtgctgagattacaggtgtaagccaccacactcagccttaagcatgtatttatttatttttattttttgagacaggatctctctgtcatccaggctggagcgcggtggcatgatcatggctcactgcagcctccacctcccaggctcaagcaatcttcccccctcagcctccctagtaggggggactataagcgcaagccaccatgcctggttaatttttattttctgtagagatgaggtcttactctgttgcccaggctgatctcaaacttctgggctcaaatgatccttctgcctcagtctcccaagtgctgacttgagccactgcacccagccttaaacattttttaaagctgcttttatctgattgaaaaatagggctattttactgactttggaaaacaatttcattttgctcttgtaccagtcagcatttttgcatcgagaggaaattttttaaagtatttggcgaatgaatcctcaccacatgttcattcggcaaatgttttcataattgctatgttccagttgcatttaagaaaagaaaaagtcacacccagatttgaaaaacagcacccagtgctgttactcagttgtagtgacctgacctctgagaacattcttactacactcctttattcacatttcagaagccatggtttctgcactctgcctgcttaaaatatgaggagcgctcctgctctgagaaggtgcccgggtcagttcgttaaaatatttgtcagtattttctcctcatggcaaagctaggtgaaattgactgtctcttcctttccctggctctttatctgtgatattacaactctcagagcaaacaccgataagagaagggcgtacaatcaaagaagcagtcaaaacagttaccaggaaaagtgcacttttttctttttgtttctggagagggagtgtcactctgtcactaggctggagtgccgtggtacgatctcggctcactgcaacctccaccccccgggttcaagcagttctcctgcctcagcctcctgagtagctgggattacaggtacaggcgcctgccactgtgcccgactaatttttatatttttagtagagacgggtttcaccagcttggccaggctggtcttgaacttgtaacctcgtgatccaccggcctctgcctctgaaagcgctggggttacaggtatgagccacccgcacctgacccacttttttcttttcttttctttttttttttgagactgagtccagtgcagtggcgtgatctcagctcactgcaacctccgcctcccaggttcaagtgattctcctgcctcagcctcccgagtagctgggattacaggcgcacgccaccatgcccggctggtttttgtatttttagtagagacggggtttcaccatgttgaccaggctggtctcaaactcctgacctcccaaagtgctgggattacaggcatgagccactgtgcccggtcctacttttttctttagtttctttagatcttgtatgttcttagaaatcagatgctattggaaatagggaagaagtgtcaaaatgatggcttgcaaaagaatggattaataaatgaaggaaaggctgggcatggtggctctacctgtaatcccagcactttgggaggctgaggcaggaggattgagcccaggagttccagagcagcccaggcaacatagtcagacctcatctgtgagctgtgattgtgccactgcactccagcttgggcaacaaagggagactgtgttcccaaaacaacaaaaacaggaaacttttaaaagattaaaatagaggccgggtgcagtggctcatgcctgtaatcccagcactttgggaggccgaggcagatggatcacctgaggtcaggagtttgagaccagcctggccaacatggtgaaactccatctctactaaaaatacaaaaaaattagctaggtgtggtggtgggcgcctgtaatcccagctactcgggaggctgaggcaggagaatcacttgaacctgggagacggaggttgcagtgagccaagatcgcaccactgcactccagccgggcaacagagtgagacttggtttcaaaaaaaagattaaaatagagatgaagggcattctagaagcagggtagagtgtcaaggaacagagatataaaaatgggagtctgctccaaaaacatcacagataagcgaggataaactgagaatcaaattgaggaaaatcaggtaagaccaatgaggtcagtgtgtatgaggcggtgtaaagatgaatagagaaccagtgacttactcgtcattctttcatcatgctgcttgctgaagtgtgtgccgagcacctgcttgggagcatttaggtgagctgctgagcagagcaggaacaggtggggctcaggggagcaggcgcagcagtgatacagcagagctcctctccacgctgccggggaacccagtgctgggacttcgcgtctagcttgtgctttccataatctttgtatgtggccacggctggccatagataggttttgtatatgtaggcataacctgtactgtgggacttactgtgttgtagtaaagcaatcaatcaagtcagagatttaaaaattcagatcttagttatgtttttatgttctttcccactatgtgtatttagactaacttcatgaaatggccaaggacaaactgtaacacatcatatttaaggtagcttgtgagctttttgagccttaccagctctgtgtcgtccccctccccagggtgcgtcagggaaatcatgcagccatcaggacacaggctccgggacgtcgagcatcatcctctcctggctgaaaatgacaactatgactcttcatcgtcctcctcctccgaggctgacgtggctgaccgggtctggttcatccgtgacggctgcggcatgatctgtgctgtcatgacgtggcttctggtcgcctatgcagacttcgtggtgactttcgtcatgctgctgccttccaaagacttctggtactctgtggtcaacggggtcatctttaactgcttggccgtgcttgccctgtcatcccacctgagaaccatgctcaccgaccctgtgagtactggctgcgtctctgggtggctctcttgtgtctggtctagtgtcctcgggtgtggctgaccctttggaggaagcagtgcacagggacatattgacatgggtgtggaacaagaaaggtggattgagctcattttgggagcagattccctttaggctgagaataaacataggccagacctagcgcagtgaaatacccctagttcctgacgccttgcaggccaccagattcagcttccagctgggctttcaggctgttcctgagttttgagacatccttcaatcagggaggggcattcgggccgatcgtacagatcttgcagctcagccatccgtcacctctagtaagtgagttccaggcttcccacagagctcggaggagacgcccagcagctgcaggcatgcaaagtcaggtattagcagtcagtagattttcatttgaaaaaagttctttccactgctttaaaacagtggttttaaaccatggtatagggactcccaatttgtcaatttaaaatctactgggttcttgtctgtttctaagctttctctaaagaaggtacccagacgttaataagataaggacttttttttttttttttttttgagacggagttttgctctttttgcccaggctggagtgcaatgtgcgatcttggctcactgcaacctctgcctcctgggttcaagctattctcctgccttagccctctgagtagctgggattacaggcatgcaccaccatgcctggctaattttgtatatttagtagagacagggtttcaccatgttgatcaggctggtcttgaactcctgacctcaggtgatccacccgccttggcctcccaaagtgctgagattacaggcatgagccatcgcgcctgaccaggactcttttttgagaataaactgaaacggatcagctcacagaatgtggtctgcacgtggctttatctgtctttgctttatctgaattaattattcagggtttggatgtacattgtttactgtctcctgttttactagtagaggtcatgggcagctgtcctgggaatgggacagtattataggcccaaccagagggcagctggggagtggtaccttggggacaaacttggaagcaaagtctgccagtggctttgtagcctgatctgatggtggagtctttgaccataactgagtctcttcgatgggtttgtgccttcagagaattaaagcctgtcttgtcatttccttttacgcggcaggtctccctctaggagccagaccctgctcctgatccctgtgtgtctccgccctctccttccttggctgcagcagaaaccccttgtttgttgcccaaagtgcccaggcacttcgacaaaggagagggccagctacagggccaggtccagctcagcgatttttactggaatattgccttgtaggaaaaatccagtgactgccgaccatctgcctgcacagtgaaaactgggctggacccaacccttgtgggcatttgtggtgagggaaccgagtctgtgcaaagcctcctgcttgtgagtgtggggtaggcacatgggggagggtcagcctggctgggagtcctcagcagtttgctcctctttgctgacaagcgcacttgccccttcctcctctgcgctcagactctacagctactcagcagtccagcttctgctcccaccccgctcctgctcctgcggaaaaggccccagaagcctggagagctggaggcggccaggaagtcagggtagaaggtgtgtgcagggcgtgctgccgccctggtgggcagatttcttttgcttgttgtattactgcagagaatgttgaatggaacatactgagggagaagttggagatcttggatgtcaggggtgttttgattgagatttaattcacatagcactaaatccatcctcgtgtgtagtcccgtggtgtttagtgcatccacagagtgtccaaccatcacccagtcggttttaggacatttttatcacctcagaaaggaaccccacaccccttagccatcacttcccagttccccgaccccaccacccgacgccctctgcccctggcaaccactcatctgctgtctctgtggaatttgcatgttcacagacttttttttttgagacggagtctcactctgtcgcccaggctggagtgcagtggcgcgatcttggcttactgcaacctccgcccccaggggttcatgccattctcctgcctcagccttccgagtagctgggactacaggtgcctgccaccatgcccggctaatttttttgtatttttagtagagacggggtttcaccgtgttagccaggatggtctcgatctcctgaccttatgatctgcccgcctcggcctcccgaagtgctgggatgattacaggcgtgagccactgcgcctggccgcctgttgagggactttcatagtcatctcgtctgtggccttttgtgcctggctctcaccaggcattgcgtcttcggggtccatcgtgctgtggcatgatcagtgcttcatttggtttaaggctgaataatattccatgctctggccggacccttctcacctatagccatcgttagttgatgggcatctgggcgagttctgcttttcggctgttacaaatcatgctgctctgaacggccgcgtgtaagtttttgtgtggatgggtgtttcattcctcttgggtatatacctaggagtggagttgctgggacatatggtgactctgtgtttaaccttttgtggaactgccaagtattctctaaagtgtccccactgggggaaaaaaaagaaaatggaaaaaaaatcttgtggggaagggaatgatgaaaaaaaaaaaacaaaccccaaaacatcgaagcatccacaccattttacattcccacctgcagtgtgtccacatcttcaacacattattgccattcttttgtgacgccgtatctcactgtctttgctgtgtatctccctaatgaccaacgatgttgagcatcatttcatgggcttgttggccatttgtgtgtcttctttggaagcatgtctgcttgagtcctctggtgacaagtgacagaaaccaccaggagtcactgtaaatgaaactgaggaagggggagtacgcagagccccagggcaaggatgcttctggctgctggcaggctgtggagtggaaggtggacagaggggagaggctggcagctgtcctcaggctttgtctgtctctctgagtcctggctttcctgctgcccagggaagaagggcagtcctcagagcaggtggagtggcagtcactgatgtccaggtctacttttctgaaggggagagtgggcatggcccagcagggtcaggtgtcacctctgttctcccagtggggagttgatttcttctctccacagatcatgtctttaccctaccagggtccagtccaggctgaactagaaccatcacatcacctctgaactgaacagttgaggggttggggcagataccccagtgggacttcatgtcatttttctaaaccaataggactgggcagtcctcgctgggattgccctggacaatacaaattgggatttgtattgtcacttgaggaaagtcattggtgctttgagtgaggagtggaggggaagatggggtcagaggcctactgatagagcaatgaaccctgctgtggaaggatgcaactttgatcccaggcttcactttgggatcgtgagagggctgggagggaggaaggccacccacggccctgggccctgcatccctttacttgttagagcctgtgtcttcaatgccagccccgtggatgcctacgagccttctcggcagccgtgcgagtgccttccggaggtagccttcatggggccgcgactgctgtccaggagctctgccaaaagcgtgctttcctcccaccgtcacagcagtgctgggacgtaggtgtagcatccgtgtgagaacacgaggcctcgctgtgccagtaagaggccaggctgggatttgaaccagattgtctatcttcagagccccggcctcgaaaatttcacttcttatgggaaattccaaatgtgcacggtaggaagaaaagagcgctccaccttgagcttgtcaccacatcatgtggtggcctcgcccacgccgttcccctcccccagataacccgcctaaatctcactcattcttttgtttcatttgtaaacgtgtgtatcttttaaaagggctctttgtaaaaacataacctcaataccggtagctcatgtaaagcaatgtatttataccacctctcctgttagagttcagatttcctcaattgtctcaattcttttttttttttttttttttttttgagacagtctcactctgttgcccaggctggagtgcaatggcaggatctcagctcattgaaacggttgcctcttgggttcaagcgattctgtcacctcagctttctgagtagctgggattacaggcatgtgccaccatgcccggctagtttttgtatttttagtagagatggggtttcatcatattggccaggctggtcttgaactcttgacctcaagtgatccgcctgcctcggcctcccaaagttctaggattacaagtgtgagtcaccgtgcctggcctgtctcaattcttttataatttttttcccttgaatcaggatccaaataaggatccatacagtgtgattggtttatgtgtctctgacatctcttttaattaatctctctggtccctgcaatgtctttttttcccttggggtttaagttgaagaaacacagttctttgtttgcagtttacatccctgtactgggttttgctgtgctcctcgtccccagcattttccataaattaggaggcagatccacaggcccggccccattcttacctgccgcttagttaggccctggggatccagaatgcatgacagggagctggggtggagagcaggggagagaggaccggaagcatgctctgcgaagcctaactgccctggaagggcgaggtggcacagagcgccttgcctgggcctggctggctgctttgtctcatcagggctgactggaagtgggatgtgggcaggggcaccagaagagggaacagccaatcagggagcacctctgaagggaggccgctgggtgtttgggtgggagggaggagcctgaaggcatcccatggcctggagcctatggtcagtcccacaagaagatgagtgggaaacattcaagaagtgttttagaaaaaaacgtcccgaaaatggttaaaatgggaactgaggaatgtgctcaattacttggaaggtttgttctggtgggaagaagaatgccccatgggtgcagaggaaacggtgctccagcccctgccgctgtcatcgtgggcacatcctggcgaggccctttgagatggtgcagccgtgcacaccccctctgcatatggtctctgtttctgccaaaccacatctcgaaaggctcaggatgaaaatgtaggtgatagactcggggcctcaggtggaaggaacccctccttgaaacccccaggacaccatgcccgtgaagagtttcactgattgtctgcccaaggttctgagcagcaaaaaggaatccctggacccagcaagtgcctgaaatcccacatagtctcaggtccctgaggatcacccaatgtgtacttggcttccccttcgaaatgcctttccttggtcataagtgaccaaaaactggggtagcgttggggtagccgctttccagaagtgtatcgtgccacatcgtatcatatttgctgctgctgtggaaaagtgcatgcatggctcataaaattacggtgtttggagttttaaaatctggcccatttcctctgaggagatgtgtaacactcgactgtcacctggggcatatatgcaacattgtggaattttataaatcaaagcagtgttaagatccctagattgttggaggaaagttgattgaagactccaggccaggcacggtggctcatacctgtaatcctagcactttgagaagctgaggcggttggatcacctgaggtcaggagttcgagaccagcctggccaacacggcgaaaccccgtctctactaaaaatacgaaaaattagccgggtgtggtggcgcacgcctataatcccagctacttggtaggctgaggcaggagaatcgcttgaaccccggaggcagaggttgcagtgagccaagatcacaccactgcactccagcctgggcaacagagcaaaactctgtttcaacaaaaagaaaaaaaaaaaaaagactctaaattgtagaatgtaagttaagtaaaaattttttttttttttttgctggagtgcagtggcgtgatcttggctcactgcagcttccacctcccgggtgctctgcctcaccctcccgagtagctgggatattacaagcgcaggccaccacgcccagctaatttttgtatttttagtagagatggggtttcgccatctttgccaggctggtcttgaactcctaacctcgtgatccacccacctcagcctcccaaagtgctgggattaaagccgtgagccaccctgcccagccagtaaaatgttttacttattctgatttaagttttcaaagatgagtttaaacccttttctaacttctttaaggaggcagcatgttaggaaacactttgatcttgaccaaaacagcttccccatattgcggccatgggactgacggggccttgtttggaggaagtaaacctcaggggaggtttgggcagtcaacactcacatttgccctggggcccccctgcctgtgctgcccaaggctccagctctggcctgttggtagccctgaatccagcgggcagcagtctctggctctgcagggcgctcacctgctgaactttctaaaatttggatgtcaaccctcaccctgcagaggttcagatctgtggctccggagcccagcgaggcacctgcattttaaggagctccagcagggccatctgctgttggcagagcccttcaccacctctgccatctcccaggctgttagctcccaccttccatttgccccacctatatcccctgtctttgcacaatcactgcagccctgactgctgttcccagtgtccgtgggtctcattctccagatctgtgatttctacgtgaagtgcaggatccaggctaagaggcagacacaaggccttgttcctcttcttgaggcattggaacccccaggcaggtctgcctattttattccaccctgccacagctcccagaattgtctcccacaaacatggttttgatgacttatctccactgcccaaagaacaaagcctctgctgttgcagccagctctggccttaccttccctacagcgggtcctcagttgacatggtgctggtagggtgactcttggccttcagctctgccccttaccagcagctcacagcctccccaactcctctttccgctgcttcgccattgctcatcttctccagctcctctagcacttggggcacagatggatgcatgttcaagtttctgatgccgctgggcggcctcgttgccagacatgaatcgggtcaggtggtctggaccgccacctccaggtttgtgtgtgaatgcctttgaggaagttggccaagagacaaaagtatcatgtcactttagcaacacgaaattaaagtcctttttgagattgttttgttctttgttccccgactgcccgataagaaaactctgggcagtgcttatcagtcacctccctgtcagcaggggctacagggaagtggtgtgcaaagaggttccctgccccacctggggacagtcagtgcccttgtctgggaataagccttgcctctgaaaatgcaggtggttaagccatttatcaaaaggataataaggtagttttttttaattgtttgatgatatagaaaatatatgattttttttttttttttgagatggagtcttgccctgtcgcccaggttggagtgcaacggcgcgatcttggctcactgcaacctctacctcctgagttcaagcgattctcctgcctcagcctcctaagtagctgggattacaggcgcctgccaccgcgcctggctaattttttgtatctttagtagagacggggtttcaccatgttgaccaggctgggttggccaggctggtcttgaactcctgaccccgtgatccacccgcctcagcctcccaaagtgctgggattacaggtgtgacccactgcgcccggcctgatgtttttaactttcattctccccaactaaagtacattcttcttatatggtagggggcagtacccaaaggaaacgctacgaaagaatacatggagagcttgcagctgaagcccggggaagtcatctacaagtgccccaagtgctgctgtattaaacccgagcgcgcccaccactgcaggtacgtgcgctgctgtattaaacccgagcgcatccgccactgcgggtacgtgtgctgctgtattaaaccagagtgcgcccaccaccgtaggtacatggcccccgagcatctgggcaacgttgtacgggcggggccgtaggtgtcatgttctttctggggtagggagctgagtaaagggccggtgccctagagtctttttgggagctgggaaacagtatggattcagggatcccctccttcccgagggactcgctgtggctcaacaactggaggaggtgacaaggttcccgcctctgttgtggcacacatgccacacaggccagcacgtgtgtgctcacagctcctgggcacatcctgtgtgggggccagaagaaaggctcagaaccttcccctcactcctgctctgggttcttccagccagccagagaggctgttgtgcgttcacttttgttcttacctggggtggtggtgcagcgtagaagcaaggttcttttggatgtgctctcatttttttgttgttttgtttttttgtatttatttgggcgtgctctcaaacaccagttactgtattttttaaaagccacagtccagttatctgcctggctcaagtagccttcctggccctcacacctcacccctgctggtcttggttgcattttatcctcttcccccacatttgccagttcctgactcctttttctgctcctggaggggctggctgttgatttcacgtgttgaagtgtgaatgtctgggtgtatttctccattccttgaaatagttgtcacacgtccctgtactgtgtgacaggctgcacctggacagtgcccttctcctggggggtcgtggcctgcttgaataggctggaagccattgatggcctccaacgggaggaaacccagatacagggtgctgactgctttatggctggagtgaaagctttaagagattcatatcctcatggtttggccagaaagtaaagaaagatgaaatggtatcggagagtaaatgggtggctgttttgggctggggttagaaataggcagtgactgcatatggggtgaggtttctttctgggatggtgggaatgttcaaaaattagatggtgatggtctcacaactctgcagatagaataaaaatcattgaattgtacattgcaaatgggtgaacttttatggtatataaattttttggggatggggggatggagtcttgctctgtcgcccaggctggagtgcagtggcataatctcggctcactgcaacctctgcctctcaggctcaagcgattcttgtgcctcagcctccctagtagctgggattacaggcgcccgccaccatgcctggctgatctttgtatttttagtagagacggggttttgccacattggccaggctggtctcgaactcctgacttcaggtgatccacctgcctcggcctgccaaagtgctgggattacaggcatgagccacctcgcctgacctatggtatataaattatacttcaataaatctgttgaagataaaatgggaatgttttggaagtcaggtgctgtggaggtcgggcagggagccaaggtcaatgaataagaagaaggtgacgctatgggcgggtgcggtggctcacgcctgtaatcccagcactttgggaggccggggtgggcggatcacgaggtcaggagatcgagaccatcctagctaacacgatgaaacccccatctctactaaaaatagaaaaaaaaaattagccgggcatggtgactggtgcctgtagtcccagctactcgggaggctgaggcaggagaatggcgtgaacccgggaggcagagcttgcagggagctgagattgagattgcgccactgcactccagcctgggcgacagagcaagactccatctcaaaaaaaaaaaaaaaaaaaaaaaggtgacgctatgatagcaagtctgcctgcagcgaacctgctgccatcgatgtctgcttgatgtaattaaatggtgcaagcttggactaaaaagtaatcgataatcaaattagttatttaaaattggacatacagagtgttttgggcaaaagtaaaatacagctgttaaaaacaagacgacttcatgcctgggtgtgtagttgatgattcaagatgaatatgcaatccatactgcatattcatcagtgaatatggattcagtggtaggaattatttgaagatacaaagaatgtttctccttgagggtaaaatttcagtttttgttttttattgaaatagacttgtaagcttgcaaaattaggaacattactgataggtgtacatgatccagctctactgggggagtgtctgagaactcgtgaagtatggcttagtttgacctttcgccccaagctgttggtccattgagtattttccttaggaaacggaagacatttaattaaaatgataaaccttaaaggaatatagtgagaatgtatgatattttttgacatgttgtattagaatatacattctaattttcctccacctttgattttatttggttgtgttactctggtttcctcagagcatggaatactgaaaaatcaaactctccttttcagtatttgcaaaagatgtattcggaaaatggatcatcactgcccgtgggtgaacaattgtgtaggagaaaagaatcaaagattttttgtgctcttcactgtaagtaaaaatatttttgtattgaatttacattgaatttgaaattctttaactgcttcttgcctggagcagagaaatctactaacgtcaggccagtttctctccagccttttctccaggattcaaattataatactgtgctgtcattggcaggaagtagtcccaataagtaatatgttgcttgtattattttaggtgttcactgtaatttaattctctcccagatgtcctcaatcgctattgtttattaataataacaggaatcttcctaaagtatgttagagtttatttcctttttcttttctttttttcttttttttttttttgagatggagttttgctcttgttgcccaggctggagtgcagtggtgtgatctcagctcactgcaacctccgcctcccaagttcaagtgattctcttgcttcagcctcccaagtagctgagattacaggcatgtaccaccacgcctggctaattttgtatttttcgtagagatggggtttctccatattggttgggctggtcttgaactcccgacctcaggcgatccgcccacctcggcctcccaaagtgctaggattacagtcgtgagccaccgtgcccggccgtttatttttttatagacggggttttgctgtgttgcccaggctggtcttaaactcctgagctcaagccatctgcccgtcttggcctcccaaagtgctgggattacaggcgtgagccaccatgcccagctatatttttctataaaattattctacttggtctaatatgatcttgggtaggaaaatgtcaactgctgccatttaatccttccctcatttttttctctgacaagatggaggtatacacatgatgtgtcatcagcctttgctcttagaaagacttgtttaagttactaactggctgggtggatcactagaggtcagcagttacagaccagcctggccaacatggtgaaaccccatctctactaaaaatgcaaaacagttagccgggcatggtgcttgtagtctcagctacttgagaggctgaggcaggagaatcgcttgagtctggcaggcggaggttgcagtgagctgagactacgccgctgcattccagcctggacaacagagggagactctgtttctaaaaaaaataaaaaataaaagtgactaaccaatctccccctcattctagatgtatatagctctgtcttcagtccatgctctgatcctttgtggatttcagttcatctcctgtgtccgagggcagtggactggtaagttccctggctatgtgtcattcctggctttgcatgctgttattggatgaaaggggaaagctttaaaggaagaaccagttttccaattttgaaggaaatcattgcaattattttagcaattgaattttaaagaatttagttaagttttaacaccaccattttactagtatattgttgccccaaaagcttgtgtctgtctgctggtcagctagctcgccattgttcaaagcaggcttcacgttgcttacgtgagtgaccgaccctaagcaagtgtagtgaaaataggtgctcgttatcctaccttagatatgcagtgaggtctggacaggctcatcccaccccaggggaacatggtgaacagactcctgtgagcactgctcactggtatgggtgcacacaactcttctggtctggcttcatttgccatttaattcataaatacagtgtcaatagaaacctcagaaaatacagactcttttgaaaccactggccaggaagtcatggtatgaatttttgcttggaagggtggccctcctctgctccttggagaacaatgaatgtgcccatttagaaagtgaacaacttccccctggaagctggccaggggctggccctagaggattcttctctgagccaaacattctgccactcggggtattcaggaccagttataaccaacttcctcttgtccgcagaatgcagtgatttttcacctccgataactgtaatcctgttgatcttcctgtgccttgagggtcttctgtttttcactttcactgcagttatgtttggcacccaaatccactccatatgcaacgacgagacggtaagctttgttctcggctgtgtggacttcatatgtggtccaagcttgagtaaatgaaaagtcctaatgtcaacaataggtgcctgtggactgactcgggaacgtaatgggacggtcttgatgagctgcaaccagctccctgtgtttgctgtttctttcattctgggcagtgcatatttctagtctcagtttgatttgcaagtcagcagagccaggcagattcccagctcccagtgcagtcagtaaatttcagggaactgactgcctttagggcctggctctgcaggcctggagtggcgctcagtaaatgtctgtacacagtaactaacgagcgacaaatgttggtgcctggctgggagggccattgtggtagtctgggctggccacgtggctgcagccgggctgggctcacagaggccacggggtctggatcggggcagagctgggaaggagagttcactcacctaccctccatcgagcccacactgtgcttgagcacggtgtgattctgaggcttggtggggtctgccgagcttcctggagccgctgccacttgcttttctttctgcttccaggagatcgagcgattgaaaagtgagaagcccacatgggagcggaggctgcgatgggaagggatgaagtccgtctttggggggcccccctcactcctctggatgaatccctttgtgggcttccgatttaggcgactgcccacgagacccagaaaaggtggcccggagttctcagtgtgaggcgtggctcatcagactgaaacttgctcacagacttccagttatttatttggggtctgaaggatatcaacagctcatctgtgaccaacagggcaactggaacctacacaaaccaattgcttgcagcaagcagagttttatatatttatagtcacagatggcagaggaagaggctctcagtccccacctgtacaacaacggaaaggtgtgtggccacacgaagaagccaaacgccgtggcctcctgcagagctggggcttctgtggagaatacttcgggttattacatgggttattcaaatcctgggtcctgagctgctgtttccaatcatgaagaaaaacagtgaatccagtgaacagggattctccaagcagtcatttcagggggctcctgctgaccccgccactcagcagtgcactccccggatcacagcagggcgtttacatagaaagacgttttggtctcgattagctccgatgctttgcactgaagttgcaaaagatctgtgcactgaacagtgaaggtggcttccggcacactccccgctgccccggaagagacatcctttgaccctctcagcaagtctgtgtgtgtgcgtgtctgtgcgtgtgcgcgcgtgtgtgcatgtgtgtcaaaattgccagtgttgtttaggcaatgtaacatttaccggctgtgtacagcaaacaagctattttttagaaaccgacgtttcagggaagaggggagagagccgcggggtcctgcccgtggttactatgaatgtattgctgttggaggacatctcgatccaaagaacagccgttcctgtgcggcccttcgttgccctcctgctttcattttttaaagaaatcttgagtgcttgagggccttggaactgattttttttttttgttccagccaaattagcagtgtataaatggcacctaggtaagagcagagctgcggctcggtgacttgatacttggggcagcccgatgctgtgtgtggggcaggggaggcatccttactggagaggcagggcccagccattgggcacctctgggaaggggaggggaccatgaggcagccagcccctggcaggggcgactgtgccaccgcaggcagcgctccagtcgggaatggccaggatggcgccctcttgttggagtttttggttagcttttacgttttcttctccacccacggcacaggtgataaaataggatccttggtgcggagcttaaaattatgccagaaagccaacagctcccctcgtggggccttgccttaaacttgcctggtttgtacattttttgccggacgcatcaagaagcaatctgtgacaaagtctgagggtcttcctttatgcttgccctccacactaagagaagttggcgtctccctcctgggaattgttttgcctttctgttcatctgtgaactgttttttgtttttaattactctgtaccccatccgaatcagggcttctaccactgctgatgcaaaaccacaaagggacctacctgagccaccgtcctagccaagcgagcaaacctgcagggggtttggaagtggacttggtcaccgcagaagcgtgtgcgccgttgggggaagagctgcgtcacagccagagggacaaagtgtgggtgatcctggagacgccagtttccgagattgttctgcatattcatttgcacattgttgtctgggttggacatgcgtgtgggcttcagtgtgaggcttttaatatgtatatcctgttatcaataaaacaattatccaagtggttgaatcctgtgagacttggcaagtgtgtgcaaatcaagtatacttgacttttcaacctcttctttcaatgtaacttttatatgaaataaagtaatcaattaacagttctcaaa

SEQ ID NO: 44 - RNA, 3279 nt, Homo sapiens
acuuccggcgcucgcaccgccccgcucuccagccaaggcuccgggcugaggcauuugcuuggcugcagccuccuuccgaccugcccggcgggacccaggggaccaagccgagccgagccgcggggcccgcuccagcccggccaugagcgcggccgcaugaugcgucccugccucggccgcugcagucgccgccgccgccgccgcaggccgggaggagccgcagcgccgggcgaccccgcccgggccucggauccgaucacauaggacaguaugcaccuuaagauccugaagaaacggcacaaaauguucaagugauguuuagaaauaacuugugagggugcgucagggaaaucaugcagccaucaggacacaggcuccgggacgucgagcaucauccucuccuggcugaaaaugacaacuaugacucuucaucguccuccuccuccgaggcugacguggcugaccgggucugguucauccgugacggcugcggcaugaucugugcugucaugacguggcuucuggucgccuaugcagacuucguggugacuuucgucaugcugcugccuuccaaagacuucugguacucuguggucaacggggucaucuuuaacugcuuggccgugcuugcccugucaucccaccugagaaccaugcucaccgacccugaaaaauccagugacugccgaccaucugccugcacagugaaaacugggcuggacccaacccuugugggcauuuguggugagggaaccgagucugugcaaagccuccugcuuggggcaguacccaaaggaaacgcuacgaaagaauacauggagagcuugcagcugaagcccggggaagucaucuacaagugccccaagugcugcuguauuaaacccgagcgcgcccaccacugcaguauuugcaaaagauguauucggaaaauggaucaucacugcccgugggugaacaauuguguaggagaaaagaaucaaagauuuuuugugcucuucacuauguauauagcucugucuucaguccaugcucugauccuuuguggauuucaguucaucuccuguguccgagggcaguggacugaaugcagugauuuuucaccuccgauaacuguaauccuguugaucuuccugugccuugagggucuucuguuuuucacuuucacugcaguuauguuuggcacccaaauccacuccauaugcaacgacgagacggagaucgagcgauugaaaagugagaagcccacaugggagcggaggcugcgaugggaagggaugaaguccgucuuuggggggccccccucacuccucuggaugaaucccuuugugggcuuccgauuuaggcgacugcccacgagacccagaaaagguggcccggaguucucagugugaggcguggcucaucagacugaaacuugcucacagacuuccaguuauuuauuuggggucugaaggauaucaacagcucaucugugaccaacagggcaacuggaaccuacacaaaccaauugcuugcagcaagcagaguuuuauauauuuauagucacagauggcagaggaagaggcucucaguccccaccuguacaacaacggaaagguguguggccacacgaagaagccaaacgccguggccuccugcagagcuggggcuucuguggagaauacuucggguuauuacauggguuauucaaauccuggguccugagcugcuguuuccaaucaugaagaaaaacagugaauccagugaacagggauucuccaagcagucauuucagggggcuccugcugaccccgccacucagcagugcacuccccggaucacagcagggcguuuacauagaaagacguuuuggucucgauuagcuccgaugcuuugcacugaaguugcaaaagaucugugcacugaacagugaagguggcuuccggcacacuccccgcugccccggaagagacauccuuugacccucucagcaagucugugugugugcgugucugugcgugugcgcgcgugugugcaugugugucaaaauugccaguguuguuuaggcaauguaacauuuaccggcuguguacagcaaacaagcuauuuuuuagaaaccgacguuucagggaagaggggagagagccgcgggguccugcccgugguuacuaugaauguauugcuguuggaggacaucucgauccaaagaacagccguuccugugcggcccuucguugcccuccugcuuucauuuuuuaaagaaaucuugagugcuugagggccuuggaacugauuuuuuuuuuuuguuccagccaaauuagcaguguauaaauggcaccuagguaagagcagagcugcggcucggugacuugauacuuggggcagcccgaugcuguguguggggcaggggaggcauccuuacuggagaggcagggcccagccauugggcaccucugggaaggggaggggaccaugaggcagccagccccuggcaggggcgacugugccaccgcaggcagcgcuccagucgggaauggccaggauggcgcccucuuguuggaguuuuugguuagcuuuuacguuuucuucuccacccacggcacaggugauaaaauaggauccuuggugcggagcuuaaaauuaugccagaaagccaacagcuccccucguggggccuugccuuaaacuugccugguuuguacauuuuuugccggacgcaucaagaagcaaucugugacaaagucugagggucuuccuuuaugcuugcccuccacacuaagagaaguuggcgucucccuccugggaauuguuuugccuuucuguucaucugugaacuguuuuuuguuuuuaauuacucuguaccccauccgaaucagggcuucuaccacugcugaugcaaaaccacaaagggaccuaccugagccaccguccuagccaagcgagcaaaccugcaggggguuuggaaguggacuuggucaccgcagaagcgugugcgccguugggggaagagcugcgucacagccagagggacaaagugugggugauccuggagacgccaguuuccgagauuguucugcauauucauuugcacauuguugucuggguuggacaugcgugugggcuucagugugaggcuuuuaauauguauauccuguuaucaauaaaacaauuauccaagugguugaauccugugagacuuggcaagugugugcaaaucaaguauacuugacuuuucaaccucuucuuucaauguaacuuuuauaugaaauaaaguaaucaauuaacaguucucaaaaaaaa

SEQ ID NO: 45 - protein, 345 aa, Homo sapiens
MQPSGHRLRDVEHHPLLAENDNYDSSSSSSSEADVADRVWFIRDGCGMICAVMTWLLVAYADFVVTFVMLLPSKDFWYSVVNGVIFNCLAVLALSSHLRTMLTDPEKSSDCRPSACTVKTGLDPTLVGICGEGTESVQSLLLGAVPKGNATKEYMESLQLKPGEVIYKCPKCCCIKPERAHHCSICKRCIRKMDHHCPWVNNCVGEKNQRFFVLFTMYIALSSVHALILCGFQFISCVRGQWTECSDFSPPITVILLIFLCLEGLLFFTFTAVMFGTQIHSICNDETEIERLKSEKPTWERRLRWEGMKSVFGGPPSLLWMNPFVGFRFRRLPTRPRKGGPEFSV

SEQ ID NO: 46 - DNA, 21631 bp, Homo sapiens
gtcctcaaccaagatggcgcggatggcttcaggcgcatcacgacaccggcgcgtcacgcgacccgccctacgggcacctcccgcgcttttcttagcgccgcagacggtggccgagcgggggaccgggaagcatggcccgggggtcggcggttgcctgggcggcgctcgggccgttgttgtggggctgcgcgctggggctgcagggcgggatgctgtacccccaggagagcccgtcgcgggagtgcaaggagctggacggcctctggagcttccgcgccgacttctctgacaaccgacgccggggcttcgaggagcagtggtaccggcggccgctgtgggaggtgcgatctcggggcagggccgggaggcgcccgaaagcccggcggtgggagtaggggagcccgggccccccgcagacttcttcccctgggcgtctccgagctggggcccgcaggaggttaaaggtcaacgggcttgggggcgccggcttgggggacgggggaacaggagcaccctggagggccggggcggattaggcaggaggagaaaaggctcttgccgagccctttcccgaggtaaaggctgagtctgtgcagtatccttcctttcaatatttatttttaatttttaaaaatttttttgagactgggtttgcacctgtttcccaggctggggcggagtggcgccagcctaacttctgagctcaagcgattctcccgccccagccttgcaatttagggggtgccaacacgcctggctaattgaaaaaaaaaaaattatctgggctcggtggctcacacctgtaatcccagcactttgggaggtggaggcgggcgaatcgcctgaggccaggagtttgagaccaggctggccaacataacagggtgaaacctcatctctactaaaaatataaaaattagccaagtgtggtggttcatgcctgtaatcccagctacttgggaggctgagtcaggagaattgcttgaacccgggagtagaggttgcagtgagctgagatcaggatgccactgcactccaacttgggcgacatagtgagactacgtctccaaaaaaaaaaaaaaggcaaaaaaacttaaaaaaaaaaaaaagatacagggtgtcactatttacccagggtggtctcgaactcctggcctcaagccatcctcccacgttgacctcccaaagcgctgattactggcatgagccacccacacactctggccacagcggcatgcactgcacagagctgggcccggggatcgggagaaggtgacagtttagatgtcctgaggtcagctctgccgaggcaggaagtcccttggttttcaaggttcacatagaggacaggacatgacatcaggcccaggacgccacccctgttcccctcctgacttggatgtgatctgcagagaagtggaactgggtgaggtctgggcggcttttgcctggtctacatcctcttattctgactttgcagcattcagtacaggagggaaagaggagggggctgggtgccagtgtgcaccccactcacagtgtcctaagcaaagctccccccattcctccaaccagccttcctccctgtgacaggcagtggccatctgcctcttagtcacaggtctgaaccttcttgcctctggctgggatgtggccctgggcttgctcctgtctcaggagatattgtgccccatccactctgaggaggaactcctggccccactggcccaggtgcacagatcgccctggcagttgacctgtcatcagcaagttatctgtcctttctgccaagaatccccgctatgtgtcagggcttgtgctaggcctgggggcacagccgtgcagcacactggtcctggacccttttgggggcctaggagctgagcccggctcttctctccacagtcaggccccaccgtggacatgccagttccctccagcttcaatgacatcagccaggactggcgtctgcggcattttgtcggctgggtgtggtacgaacgggaggtgatcctgccggagcgatggacccaggacctgcgcacaagagtggtgctgaggattggcagtgcccattcctatgccatcgtggtcagtgcggccaggagcaggcagggcgggtgggggggcacggctgctgaacagcatgggacctccagctgccacccacggcatgtatgctggggtgggatggtggggggtcctgccctgccctgccctgggggctgtgccctgtatagggggataggtagcctgatctaccccattgggatgtcattcttcccgtctggctggaaggccccggagccccatgctgcaggttatgtgagggagtgcccgatagtagggcgcctcctcatgccctgacctgcagccccctccccgtatctcctgtgtctgcagtgggtgaatggggtcgacacgctagagcatgaggggggctacctccccttcgaggccgacatcagcaacctggtccaggtggggcccctgccctcccggctccgaatcactatcgccatcaacaacacactcacccccaccaccctgccaccagggaccatccaatacctgactgacacctccaagtgggtaccatcctgcctccattgcacacacccaccttcccgccccaccctgtggtcttcctggtagggactgggtggccttcacagagtggaggccttggatctggggaggccagggaggcctgtgagctgaggtcaggggacccagagcaagggcccagcaaaccacagtcctcccatcctaggtatcccaagggttactttgtccagaacacatattttgactttttcaactacgctggactgcagcggtctgtacttctgtacacgacacccaccacctacatcgatgacatcaccgtcaccaccagcgtggagcaagacagtggtgagggcttctggtaggatcctctcagcggggcccagggtggctctgtttgttccctgtttggaaagctctcccaggaaaaaggtgctcccagcatctctacaccctcacagattcccttccacctatgaagctaaaattcagcctgtgtgagcggatacgggctcccaaaatcacccgtgtggttgacctcgctaggagaagaggggtctggcctaacgtcacacagctcggggtggcaatcctgtcccttctctatggtgctactctcactccatctccccttgctacacatcgtgctcaaggaacaggcagcttcggtggggggggcgccgggcatggtggcttatgcctgtcatccagcactttgcaaggaggccctggtataaggatcacttgaggccagtagttcaagagcagcctgggcaacatagtgaggccatcaccacaaaaaattaaaaaattagccagggatggtgatgtgtgccggtagtcccagctgctgaggcaggagaatcacttgagcctgggatgtcaagggtgcagtgagctatgaccacaccactgcactctggtctgggcaacagacgcagaccctgtctttctttttttcttcttttttttttttgagctggagtctcgctctgtcgccaggctggagtgcgatggcgtgatcttggctcactgcaacctctgcctcccgggttcaagcgattctcctgcctcagcctcccgagtaactgggattataggcacccgccaccacgcccggctaatttttctatttttttttagtagagacagggtttcactctattggcctgactggtcttgaactcctaacctcaggtgatccaccctcctcggcctgccaaaatgcaagggttacaggcgtgagccactgtgcccagctgggataccctgttttttttgtttttgttttttgtttttgagatggagtcttgctctgttgtccaggctggagtgctgtggcgtgttcttggctcactgcaacctccgcctcccgggttcaaacaattctcttgcctcagcctcctgagcagctgggattacaggcgtgtgccaccacgtccagctaatttttgtatttttagtagagatggggtttcaccatgttggccaggctggttcaactcctgacttcgggatccacccgcctcagtctcccaaaatgctgggattacaggaatgagccacagcgctcggtctgtatttaagaaaaatttttgttttaagttttttttctttttaaaaatatatctttttcagggcgggcgcggtggctcatgcctgtaatcccagcactttgggaggccaaggtggggggatcacgaggtcaggagatcgcgaccatcctgactaacatggtgaaactccgtctctactaaaaatgcaaaaaattagccgggcatggtggcaggggcctgtagtcccagcgactcgggaggctgaggcaggagaatggcgtgaacctgggaggcagagcttgcagtgagctgagattgcatcactgcactccagcctaggggacagagcgagactccatgtcaaaaaataaaaataaaaaaatatatatatatctttttctttttctgagatgaggcttgcactgtggcccaggctggagtgcagtggtgagattattgacagccgttgtggggccgcggttctaagtttaaaagaatttaggctgggtgtggtggctaatgcctgtcatcccagcactttgggagtccaaggtggatggatcgctttagctgcaaagtttgagaccagcctgggcaacatactgagaccctatctaagaaaaaaataaataaataaaataaaataaatgaataaaaaagaatttaaaaaagaatcccacagcaaagacaatgcaccatagagcaatttattgccaaggaaaggtattttggaagttaagtttagaacagcctgggtgcactggctcatgcctgtaatcccagcacttttggaggccgagatgggtggatcacttgagctcagaagttcaaaccagcttagccaacattagctggacattgtggtgtgagcctgcaatcccggctactcaggaggttgagatgggagaattgtttgaacccgggaggtggaggttgcagtcagctgagattgcaacactgcactccagcctaggtgacagagtgacacccccatctcaaaaaaaatagtgaagtgcaaaatgcacagttcaccctgagacacagaattcaggacaggctgctcgtaaggatgagacagcaccgattattactggggaaactccctttctgggagtcttccgtgatgaattcctaaggagctgggaagaggtgttactgtaagcacgttctgggccgtcctctggttgcacatgcgtagtagctgtacatgcttgttcacacgtcacgtgtctcagtgccgtggttggcatgtctgagggacacggtcacttccttgactacctatcctgcctcaagatcatagctcactgcagccccgaactcctggctcaagcaatcctcccacttcagcctcccaagtagctggggctgccggggctgcaagcacgcaccaccacgaccggctgattgtttgtatttttagggaagaagtggtttccctatgttacccaggctggtcttgaactcctggtctcaagcgatcctcccaccccagcctcctcaagtgttgggattacaggtgtgaccactgcacctggccaaaatctttttttaaattaaaaaaagcaccgggtgcggtggctcacacctgtaatcccagcactttgggaggccaaggcgggtggatcacctgaggtcaggggttcaagaccagcctggccaatatgacaaaacccatctctactaaaaatataaaaattcgccaagcatggtggtgcacgtctataatcccaggtacttgggaggctgagacaggagaatcacctgaaccccagaggtggaggttgcagtgagccgagatcatgccactgcactccagcctgggggacagagtgagactccgtctcaaaaaaaaaaaataagaaattaaatttaaaaaaagcaacagaaacaaatggctgcctggcagcggtggctgcagggcgctcctgtttgtgtgactcaggtcgtgtccctccctcagccctggtctctcttgtttcttgcagggctggtgaattaccagatctctgtcaagggcagtaacctgttcaagttggaagtgcgtcttttggatgcagaaaacaaagtcgtggcgaatgggactgggacccagggccaacttaaggtgccaggtgtcagcctctggtggccgtacctgatgcacgaacgccctgcctatctgtattcattggaggtaatggtggtttgggacatgcctaagggaggtcttttgcccccatgtggtgaccctggcttcagcaggagcccaagacaggtggatgggcaggcatggtcctctgagctttctgatgtttctcacccttggtgggaggcccattttcttttttttttttttttttgagatggtctcactctgtcacccaggctggagtgcaatggcctgatcacagctcactgcagccttgaactctcagcctgcagcagtcctcctgccttggcctcctgagtagctgggactacaggcacatgccaccatgtctggctaaataaaaaaaattttgtagcctgggcagagtgactcatgcctgtaatctcagcattttgggaggctgaggtgggtggatcacttgaggccaagagttcaagaccagcctggccaacatggtgaaaccccatctctactaaaaatatgaaaatttgctgggcatggtggcgaacacctgtaattccagccactcgggaggctgaggcaggagaattgcttgaactcaggaggcagaggctgcagtgagctgagatcacaccactgcactccagcctgggggacagactgagactgtctcagaagaaaaacattttttttttatagagatggggtctcagtctgtcagcaggctggtcttcaactcctggactcaagtgatcctcctgccttagcctcccaaagtgtgggaactccaggcatgagccaccttgtcttgtcaaagggaaggccatgttttgaagggcaggttcccagggtcagccagggtagggcagaacctctgattgctgcatctctgcttacaggcccagaggcagctgctggggtgcacgaggggccttcctgctggagggcaggccggatggggctcaggctgtcggggtgctcacacctggtgctttggctgtcataggtgcagctgactgcacagacgtcactggggcctgtgtctgacttctacacactccctgtggggatccgcactgtggctgtcaccaagagccagttcctcatcaatgggaaacctttctatttccacggtgtcaacaagcatgaggatgcggacgtgtgttggggctcctgggtccttgtcggggctgcttctggtcaccctccactttcgccttccctgtgtcctgcagttgagggcagctcagggcaatgaggcaaatggctccaaatggagagggggctcatggggtggctctccagggtcctggctctcagaggaagtgcagcttcgacagggacaggggtcacttggctctgctatctcctagatccgagggaagggcttcgactggccgctgctggtgaaggacttcaacctgcttcgctggcttggtgccaacgctttccgtaccagccactacccctatgcagaggaagtgatgcagatgtgtgaccgctatgggattgtggtcatcgatgagtgtcccggcgtgggcctggcgctgccgtgagtctctgctgtgcacctgctccgcctgcccagcccgggggcgtcaccgtgaccctctgtcccttccctcctggcccgcaggcagttcttcaacaacgtttctctgcatcaccacatgcaggtgatggaagaagtggtgcgtagggacaagaaccaccccgcggtcgtgatgtggtctgtggccaacgagcctgcgtcccacctagaatctgctggctactacttgaagtgagtgctccctccctgccctcggctagagtgggaaggagaccctggcaggtggctggcctcggtgggcatgtgctgttcaagatcggcctcgtgtccagcccaatgggaaggccgtccatacccagatagttcaggggaccaaatatctacccacccaaattgtggttttcttttttgttctttttttttctttttgagatggagtctcactatatggcccaggctggagtgcagtggggtgatctccgctcattacaacctctgcctcctgggttcaagtgattctcctgcctcagtctcctgagtagctaggattacaggcacccatgaaccactgtgctggggctgtttttttttttcaaaatgggttctcactctggttgcccaggttggagtgcagcggtgcagttttggcttactgcagccttgacttcccaggctcaggtgatcctcctgtctcagcctcccaagtagctgggattctagatgtgtgtcatcacgcccagctaatttttgctttattttttattttttggatatgcagtctccctctattgcccaggatggagtgcaggggcatgatctcagctcactgcaacctctgccgctcaggttcaagtgattctccagcctcagcctcccgagtagctgggattacaggcacatgccaccacgcccagctaagttttccttttttcctttttatgagatggagtctcactccgtggccaggctggagtgcagtggcgcaatctcgtctcactgcaaccttcaccttccaggttcaagtgattctcctgcctcagcctcctgaggagttgggattacaggcacacgccaacataccctgctaatttttgtatttttagcagagacggggtttcaccattttggctaggatggtctcgatctcttgaactcatgatccgcctgcctcggcctcctgaagtgctcggattacaggcgtgagctaccacgcctggccaacttttgcatttttcagtagagacggggtttcactatgttgggccaggctggtcttggactactgacctcaggagatccacttacctcggcctcccagagtgctgggattacaggcgtgagccaccgtgcccggctaattagagactgggtttcaccatgtttgccaggctggcgtggaactcctggcctctagtgatcctcctgcctcaccttcccaaagtgctgggattacaggtgtgaaccaccacacctggcccccttttcttccttacaatcgtgcagttctaactcagcgttcagagttggatttttcacttggggtagaagcaggagaggtggtagaaatgcctcttgactcatacagcacaccccaatttcatgcagtgctttgggctgagccaagtctgcagcaggcagaaggctctgagaagttgttgcagcctgggccaaggacaattcagagcttgggggcacaggggtgtgctcagcaggactgggtggacaggccctttgttgcgaaggggaagagtacaggcttccaggagcaggtgtttgaggcttctttgggaggtggccagaggagatgcctgttttctggggcaggatttggagggagccacccaggctggagaggttcagccaggctgtcacaggctttgaagtttcccatctgagagcctggctgttggagagtgtgggtttggaacttgaggctagggggttcttttctgatctgtgccagccacagccttcggataggcagagcaatgatgggggagggcgtaaaagaagaaatgaactgaggaaagagaagaggaaaacaggcttcaacaacagtctaggctgggtgcggtggctcacgcctgtaatcccagcactttgggaggccaaggtgggtggatcacctgaggtcaggagtttgagaccggcgtggccaacagatattgaaaccctgtctctactaaaaataaaacaattagcggaacacagaggtgggcgtctgtaatcccagctacttgggaggctgaggcaggagaattgcttgagcccaggaggtggaggttgcagtgagccaagatcatgtcattgcactccagcctgggctacagagtgagattctgtctctcaaaaaaacaaaaacaaaaacagtctgtactgtggaggcctcgggcaggtgccaggagctctgagcacagacgggtccctctgttgggtttttcttcccttctaagggccatttcttcttatttatttatttattttttgagatggagttttgcacttgttgcccaggctggagtgcaatggcacaatctcggctcaccacaacctctgcctcctgggttcaagtgattctcccgcctcagcctcccgagtagctgggattacaggcatgcgccaccacgcccagctaatttgtatttttagtagatatggggtttctccgtgttggtcaggctggtctcgaactcccaacctcaggttatctgcctgcctcagcctcccaaatagctggggccacaggtgtgtgcggccatgtcaggctaagtttaaatttttttttttttttccgcaagatggagtcttgcttgttgcccaggctggagagcactggtgcaattttggctcactacaacctctacctcctgggttcaggcaattcttctgcctcagcctcatgagtagctgggattccaggcgcatgccaccatgcccagctaggttttttttgtatttttttgtagagatagacttttaccatgttgaccaggctggtctcaaactcttgacctcatgatccacccgcctcggcctcccaaagtgttgggattacaggcgtgagccaccatgcccgcccctaatttttaaatttgttgtagaaacaaggtcttgctatgttgcccaggctggtcttgaactcctggtctctggtaaaactcccaaagtgctgggattctaggcgtgagccgccttgcccggcacttgcaccatttctctgcatgcgtctccactcccactgcccaggacctgtggacttagatttgagtcactgctgagcacctcgcacctagccccatgcctgcctcccagcctgcactccgtttgcttgatgcattaataaatatccctcccaaatctgcatccatccacctcctgtgttcaagagctgtttcagggcgtcaacctcatttttgccagtgtccagcctagtgacctcagctctgtgtacctggaagagtggctgctcctctgggggtataggattcggagatgggggtagaaggagtgatgttagagagctcggtctaggactagaggatcatatgcccttatgtaaaatacatctcaagttagggaagaaagcagcggctccatgcttttttttttttcccctttgtttttgtttgtttgttttgagacagggtcttgctctgtggaccaggctggagtgcagtggcatgatcttggcccactgcagactcctccttctgggttcacgccattcttctgcctcagcctcctgagtagctcagactataggcgccggccaccacgcccggctaattttttgtatttttagtagagacggggtttcaccgtgttaggatggtatcgatctcctgaccttgtgatctgcccgcctcggcctcccaaagtgctgggattacaggcgtgagccactgcgcctggccgctaatttttgtatttgtagtagatagagttggggtttcaccatgttggccaggctgatcttgaactcctgacctcaagtgatccacccacctcggcctcccaaagtgctgggattacaggtgtgaaccatcgtgcctggccccgtgttgtgttctggcggtggaagatgggacagagaggatgggagggtgtctgagccattcctggactgatggaacctgtttcttctgccttttgtggacaggatggtgatcgctcacaccaaatccttggacccctcccggcctgtgacctttgtgagcaactctaactatgcagcagacaagggggtgagcctgggggtccccaccccacttctccctgcctttgcctgggcttgtcctgaagcctggtcatgggaacagccaggaagaaccatgcgctgccagtctgggttttatttcattttcttttttacttaaaaagatagagacagggtcttgccatgttgcccaggctggtctccaactcctgggctcaagcaatcctcctgccttggcctcccaaagggctggggttacaggtgtgggccaccacaccccggccgcagccagtctgttttcacagatggtctttgggttaatgagaattctccccctgcttactcgccaggcagtgtggctttctcaatccaaggaggctgggcatagggagatgggatttgtttgctcagtttggactcagcattttttgcacttcgatttaatagactcataaaacatcaaagatttaagggagcttagagttcatctggcccacacctggctgatgagaatctctaggggaagtttttatgaaatgccagatctctgcattctgaggtcctgatttagtacgtccagggttggaacttgagtttttctttttcttttgtagaggcaaggtcttactctcttgccctggctggagtgcagtggtgcaatcacagctcactgcagccttgaattcctgagcccaagtgatcctcctgcctcagcctcccgagtagctgggactccaggttttcaccactgcgcctagctaattttatatctttttgtagaggtggcatctctctatgttgcccaggctggtctcaaagtcttgagctcaagtgatctcctgccttggcctcccaaagtgctgtgattacaggcatgagttgcagtgcctggctgacattagcattctttatttatttatttatttattttgagatggaatcttgctctgttgcccaggcttgagtgaaatggtgcaatctcagctcgctgcaacctcgtcctcccaggttcaagcaattctgcctcggcctcctgagtagctgggattacaggtgcatgccaccacacccagctaatttttgtattttttagtagagatggggttttgccatgttagccaggctggtctcaaactgctgatctcaggtgatctgcccactttggcctcccaacgtgctgggattacaggcgtgagccaccacacccggccagcatttttactagaaagaaatgtgttcaggacgcattagaaactagccagttggacacagaagcccctgctgctcagctgtaagcaccgctatgctgaagcttggggtggtcctactcggtcgtcaccgccctgctccttggagtgacttttctggccctctgcagtccacagtgctgccttgtgaaagctccctcaagatcctctgtgacagccgggcatggtggcttacacctatcatcccagcactttgggaggccgaggcaggcagattacttgagatcaggagttcaagaccagcccagccaactggtgaaacttcatttctaccaaaaatacaaaaaattagctgggcgtggtggcgcacgcctgtaatcctagctactcgggagactgaggcatgagaagcacctgatggtgggaggcagaggttgcagtgagctgagatcgcaccactaacattctagcctgggcgacagagcgagactctgtctccaaaacaaaacaaaagattttctgtgagaatgactgcatcggcccctcgggtggcagcgcttctccagggcaaggtgaggggaagcccagtgatgggagtgctgcctggagaggagtcagttccagtggtgggggccctgggctttggctgagggctgtgcgttggcagctgctgtgcctctcacagcccttcccagcggcgcacgtcatgagtgtcagtgtggagtcccaggcctacctcctctgggccactttgtgaccatgtttcttgcctatggcagggtaatttcaggatctaaattggtacacttggacgttctcagccccaggaggcagctgttcccgttctaggtttttttttttttttttttttggtagaaatgggggcttgtgatgttgcccaggctggtctcgaactcctgggatcaagtgatcctcccatcttggcctcccaatgtgctgggattacaggcatgagccaccgtgccctgctaattttcttactactattttttgtaatgctgcagtcttgctgtgttgcccaggctggtcttaagccatcctcctgcctcagcctcccagagtgctgggattacatcccccttaccttctctgccagaggagcccccgcagtgtgtgaatgctgagtcatgctgtctactgagtgctgaacgggctctgctgctctggtcctaggctccgtatgtggatgtgatctgtttgaacagctactactcttggtatcacgactacgggcacctggagttgattcagctgcagctggccacccagtttgagaactggtataagaagtatcagaagcccattattcagagcgagtatggagcagaaacgattgcagggtttcaccaggtaagcagtgttgagctttctgcttgtgtgttctctcagggcagagatgtcactcacctcctccagcctgacctgcgcccactgcactgctcccctcgcttcagctttgggctctcctcccacggccccgtccacgttccctcaccgccaacagccaggcctgtgccccactcacttggtcctcagaggtggcctccttactggctttgtttccagatagcctcctatcacccgtgcccaagtggtctttctaacagatccaaatttgtatttgtttttgagaccggatctctctgtcacccaggctggagtgtggtggtgcgatcactgctcactgcagccttaacctcctgggctcaagtgatcctcccacctcagcctcctgagtagctgggaccataggcacatgccaacacgcctggctaatttttttacttttgtagagatggggtcttgccatgttgcccagactggtcttgaactcctggcctcaagtgatctgcctcaggctcccaaagtgctgggattacaggtgtgagcctctgcaccagccacagttgaaaattttgggagtcctgtcattggctcccccaggcccacaggacaaagccctaacctctggtcaggacactcagtgtcctctgctctctcctgggttttcatccccttctcccctctatcccagccactgatctgtttccactgccctcgcttgctctcctgctcttgcttgagctgtttcttctgcctggaatgcccatgttggcaccataatcaccaactaaaatatcctttttcttaattttcatattttagatatagggtcttgctatgttgtccaggctggtctcaaactcctggactcaattgatcttcctgccttggcctccaaaagtgctggaattacaggcatgatccactgtgctagcctttttttctttttctttttttcagggtcttgttgtgttgcccaggctggagtgcagtggtgtcatcatagctcactgcagccttgaactaaagggctgaagtaattcttccacctcagcctcctgagtagctgggacgacaggcatgaaccaccatgtgcagcctatttttaaatttttttgtaaagatggagtctatcaggctggtctagaactcctggccttacgtgattgtcctgcctcagactcccaaagtgctgggaatccaggcatgagacaccatgcccagcctgtcgtcatttttttaatctatctcatttttttgtcctcctcaccaaagatatgttggtttgtcttgtgaggttttttttttcctgtggattcctgaaccccatccagcccctcattcccaccccagccagctcacacttgtttgtcacagctcctggttgacacacagggaacagccacccacagtggactgcgctgttctgtttgcacccttaaatttatcgtgcttacagaatgccacttctgcaaactagtcaagtaggggaagtggctcttggatatatttgcttgcgcatcctctttgaaaaggtaaccagctctgaattctttttttttttttgacacagagtttcgctctcgttgcctaggctggagtgcagtggcgcgatctcggctcactgcaatgtccacctccctggttcaagcgattctcatgcctcagcctcccgagtagctgggattacaggcatgcgccaccacgcccacctcattttgtatttttagtagagatgaggtttcaccatgttggtcaggctggtcttgaactcctgacctcaagtgatccgcccgccttggcctcccaaagtgctgggattacaggcatgagccaccgtgccaagccctagctctgaattcttaagaaactcttgagagggtctaggtcagtgctgatagaacctctgcagtgctgggcatggtggctcacacctggaatgctggcactttgggaggccaaggtcagaggatctcttgagcccaggagtttgagaccagtctgtgcaacatagaccccatctctacaaaaaatttaaaattagttgggcatggttatgagtgcttgtagtccaagccacttgggaggctgaggtgggaggattgtttgagcccagtaggtcaaggctgcattcagctatgattgcaccactgtactcccacctgggtgacagagtgagaccttgtttcaaaaaataaaaaaaaacaaacttgcaatgatggaaatgttctatatttgcactgtctgaaatggtacacactagctacacatggctactgaggtcttgatatatgactaggataactgaattgatttagtttaattaaataaatttttttgagacagcctcactctgttgcccaggctggagtgcagtggcataatcacagctcactgctcaacctcctgggctcaagcgatcctccctccttagccccaagtagcttgaactgcaggcgtgcgccaccacacctggctaatattttgactttttgtagagactgggtctcactgtgttgcctagactagtcttgaaatcctgggctgaagtgatcctcctgtctcgacctccaaaagtgctggcattacagacctgaggtaccatgcccagcctggtttggttgagtttaatttaatttaatttttatatatatatatatatttattagagacagggtctcactgtgtcacccaaactggagtgcagtggtgtgaacacagctcactgtcgctttgatctctggggctcaagcagtcctccaacctcagcctcccaagtagctgggaccacagatgtgtgccactaggcttggctaatttttgtactttttgtagagatggggtcttgctatgttgcccaggctggtcttgaacacctgggctcaagcagtcctcccacctcagcctcccaaattgctgggatgacagacatgagccactgcacctgactgaaagacatatttttgcctgtagtgtagtttagccttaagactgtaccagcagatagaggtggaaaagtaatgtgaaacgaatgtcaaattacgtttataaataaagcagctgctcattaaggttgtttttttttttaaacctccttttttattctgggttacatcattccctggctgtctttaccccagcatcagtgagtcctgcagtcactatagccccctgtgaagacagatattttggtcaccatcaagtggatctttatttttatctaacatttacaattctgccagttctgactcttacattctctttgccttgaatcctaggatccacctctgatgttcactgaagagtaccagaaaagtctgctagagcagtaccatctgggtctggatcaaaaacgcagaaaatacgtggttggagagctcatttggaattttgccgatttcatgactgaacagtgtaagtggcagtttggctcatgggataacgtacccgtcctcattttttcaggttgcctttccaattctggccatttcaattgtaagaatattggaaacaaagttggggaagctggtttaatccatgtaggttgcgttgagaattttctaggaaaagtaagttgtgtttaggaagtaggaaagcaatcaggcccccgcctcccaaatacggtcaaaaagcaaacaggagagtcagctatagtgaatcggaaatggctggcttgccttttccttgtctattttgtagccaaggaggaacgaaaaacgggacctcatcatggatttacttttgggatacactcattattccatagaagggtacaaagcctgagaaacttaaggtatttcagtctgttgtatattacttgcgaaaagcaggcttatcaaatacaggtgagtttcaacgcatcttgaatttggcagcatttacaagtcttcaggccaggtgtagtggctcacgcctgtaatcccagcactttgggaggtcagggtgggaggatcgcttgaggccaggagttcaagaccagcctgttcagcatagcaagaccccatctctacaaaaaataaacagattagctaggcgtggtggtgtgtgcctgtagtctcagctgcttgggaggctgaggcaggcggataacctgagcacaggagttggaggctgcagtgaactatgattgcaccactgcacaagagcctggacaacagagtgagacttgtctttaaaacacaagattggtcttcaaagagaataacatctgcggtgtcttgtgaggatggatgaggggctgccaagttcgcaatgaatgtgtcccatttcttcttagtttatggacttaccataaactgaagatagcagtttggtgggttggagaagcatgtggtaatggtgggaattataatacattacttacagggaaagacaggcctttgaaaggtaaagcgtaagagtgagaatggaatacggatgaatgaatgaacaagatgaggtgagaaggaagaggtaaagggaaaaggagaacaggaagctgtcctctgcgtggcacctgtgataaatggtttctggggacatccctgatggcagttttgtggagaggtgcgaggctttatgcggtaagaaatgagctgcaggctgggcgcagtggctcaagcctgtgatcccagcactttgggaggccaaggtggacagatcacctgaggtcaggagtttgagaccagcatggccaacatggagaaaccccatctctactaaaaatacaaaattagccgggtgtggtagcgcatgcctgtaatgccagccacttgggagactgaggcatgagaatctgttgaacctgggagatggaggttgcaatgagctaagatcacagcactgtactccagcttgagcaatagagtgagactcttttttttttttgagacggagttttgctcgtttcccaggctggagtgcagtggcgctatctcagcctactgcaacctccacctcccaggttcaagcaattctcctgcctcagcctcccgattaactgggattgcaggcatgcgccaccacacccggctaattttgtatttttagtagagacggggtttctccatgttggtcaggctgggcttgaactaccgacctcaggtgatccgcacatctgggcctcccaaagtgctgggattacaggcatgagccaccatggccagctgaaactcggtcttaaaaagaaaaaagaaatgagctgcatcacgttgggcaagtcacctaagcttttcataagcctgtccagtggggataatgccacctccttgttggtgtcgtaagggctgcatttgatgaagtacttggcgatgcctgtgttcacttatggaagaaacagtcttgaaccttttggtggggaaagccccctttccatttaacatttccatttagtggtggtcttactggggacagagaatgtcctgagagcacagccctgacaggtcgttgccagctgtgctcctccaccaggctcagctcaggcctaatgaccaccagtggtgggtgctgccaagctggacgtcagccccggcggactttgaactccatgagtaggtcccacgcagggacctgtggctggtcaggaccctggctcccactaggcgctatctcttcagaaaggcccaaggcttttcaagggtaactgtcccagatacccctagccctctgcctacccagttaccagacagctgggtacccagcatgtaaaccttagtttgcaaataaaagataaacttttagtgctttttttttttttggagatggagtctcactctgtcgcccaggctggagtgcagtggcacaatctcagctcactgcaacctctgcgtcctgggttcaagcgattctcctgccccagcctcctgagtagctgggaccacaggcacccaccaccatgcctgtataatttttgtatttttagtagagatgaggtttcaccatattgtccaggctggtcttaatctcctgaccttgtgatccgcctgctttgtcctcccagagtgctgggattacaggcatgagccaatgtgcccagccagtttttgtatttttaatagaggcgggtttcctcatgttggccaggctgatcttgaactcctgacctcaggtgatccacctgcctcagcctcccaaagcactgggattacaggcgttggccaccacacctggccactgttttgggtttttttcccctaacagactagaaaactagaaattaacacaccagggaacctgggtgtttgggcagagcagtggtatttaaatatttcaacccataaattgtcacttcagagcaagcatcctgaaactgtaagaggacatttggctgagcatggtggcttgtgcttataatcccagcactttagggaggctaaggagggcagattgcttgagcccagtagtttgagaccagcctggacaacataatgagaccttgtctttactaaaaaataaaaataaaagattaccgggcatggtggtgctggagaggctgaggcaggaggattgcctgagcccaggaggttgaggctgcagtgagctatgattgtgtcaccgcattccagcctgggcaacagggagaaaaaagaaaaaaaaagacatttctatttagtgcctaccttagctccagactggttctaacttgacccatcagaagacatctgaatcgctttgtgtcttttttttttttttgtagcaccgacgagagtgctggggaataaaaaggggatcttcactcggcagagacaaccaaaaagtgcagcgttccttttgcgagagagatactggaagattgccaatgaaaccaggtatccccactcagtagccaagtcacaatgtttggaaaacagcctgtttacttgagcaagactgataccacctgcgtgtcccttcctccccgagtcagggcgacttccacagcagcagaacaagtgcctcctggactgttcacggcagaccagaacgtttctggcctgggttttgtggtcatctattctagcagggaacactaaaggtggaaataaaagattttctattatggaaataaagagttggcatgaaagtggctactgaaaa

SEQ ID NO: 47 - RNA, 2321 nt, Homo sapiens
guccucaaccaagauggcgcggauggcuucaggcgcaucacgacaccggcgcgucacgcgacccgcccuacgggcaccucccgcgcuuuucuuagcgccgcagacgguggccgagcgggggaccgggaagcauggcccgggggucggcgguugccugggcggcgcucgggccguuguuguggggcugcgcgcuggggcugcagggcgggaugcuguacccccaggagagcccgucgcgggagugcaaggagcuggacggccucuggagcuuccgcgccgacuucucugacaaccgacgccggggcuucgaggagcagugguaccggcggccgcugugggagucaggccccaccguggacaugccaguucccuccagcuucaaugacaucagccaggacuggcgucugcggcauuuugucggcugggugugguacgaacgggaggugauccugccggagcgauggacccaggaccugcgcacaagaguggugcugaggauuggcagugcccauuccuaugccaucgugugggugaauggggucgacacgcuagagcaugaggggggcuaccuccccuucgaggccgacaucagcaaccugguccagguggggccccugcccucccggcuccgaaucacuaucgccaucaacaacacacucacccccaccacccugccaccagggaccauccaauaccugacugacaccuccaaguaucccaaggguuacuuuguccagaacacauauuuugacuuuuucaacuacgcuggacugcagcggucuguacuucuguacacgacacccaccaccuacaucgaugacaucaccgucaccaccagcguggagcaagacagugggcuggugaauuaccagaucucugucaagggcaguaaccuguucaaguuggaagugcgucuuuuggaugcagaaaacaaagucguggcgaaugggacugggacccagggccaacuuaaggugccaggugucagccucugguggccguaccugaugcacgaacgcccugccuaucuguauucauuggaggugcagcugacugcacagacgucacuggggccugugucugacuucuacacacucccuguggggauccgcacuguggcugucaccaagagccaguuccucaucaaugggaaaccuuucuauuuccacggugucaacaagcaugaggaugcggacauccgagggaagggcuucgacuggccgcugcuggugaaggacuucaaccugcuucgcuggcuuggugccaacgcuuuccguaccagccacuaccccuaugcagaggaagugaugcagaugugugaccgcuaugggauuguggucaucgaugagugucccggcgugggccuggcgcugccgcaguucuucaacaacguuucucugcaucaccacaugcaggugauggaagaaguggugcguagggacaagaaccaccccgcggucgugauguggucuguggccaacgagccugcgucccaccuagaaucugcuggcuacuacuugaagauggugaucgcucacaccaaauccuuggaccccucccggccugugaccuuugugagcaacucuaacuaugcagcagacaagggggcuccguauguggaugugaucuguuugaacagcuacuacucuugguaucacgacuacgggcaccuggaguugauucagcugcagcuggccacccaguuugagaacugguauaagaaguaucagaagcccauuauucagagcgaguauggagcagaaacgauugcaggguuucaccaggauccaccucugauguucacugaagaguaccagaaaagucugcuagagcaguaccaucugggucuggaucaaaaacgcagaaaauacgugguuggagagcucauuuggaauuuugccgauuucaugacugaacagucaccgacgagagugcuggggaauaaaaaggggaucuucacucggcagagacaaccaaaaagugcagcguuccuuuugcgagagagauacuggaagauugccaaugaaaccagguauccccacucaguagccaagucacaauguuuggaaaacagccuguuuacuugagcaagacugauaccaccugcgugucccuuccuccccgagucagggcgacuuccacagcagcagaacaagugccuccuggacuguucacggcagaccagaacguuucuggccuggguuuuguggucaucuauucuagcagggaacacuaaagguggaaauaaaagauuuucuauuauggaaauaaagaguuggcaugaaaguggcuacugaaaaaaaaaaaaaaaaaaaaaaaaa

SEQ ID NO: 48 - protein, 651 aa, Homo sapiens
MARGSAVAWAALGPLLWGCALGLQGGMLYPQESPSRECKELDGLWSFRADFSDNRRRGFEEQWYRRPLWESGPTVDMPVPSSFNDISQDWRLRHFVGWVWYEREVILPERWTQDLRTRVVLRIGSAHSYAIVWVNGVDTLEHEGGYLPFEADISNLVQVGPLPSRLRITIAINNTLTPTTLPPGTIQYLTDTSKYPKGYFVQNTYFDFFNYAGLQRSVLLYTTPTTYIDDITVTTSVEQDSGLVNYQISVKGSNLFKLEVRLLDAENKVVANGTGTQGQLKVPGVSLWWPYLMHERPAYLYSLEVQLTAQTSLGPVSDFYTLPVGIRTVAVTKSQFLINGKPFYFHGVNKHEDADIRGKGFDWPLLVKDFNLLRWLGANAFRTSHYPYAEEVMQMCDRYGIVVIDECPGVGLALPQFFNNVSLHHHMQVMEEVVRRDKNHPAVVMWSVANEPASHLESAGYYLKMVIAHTKSLDPSRPVTFVSNSNYAADKGAPYVDVICLNSYYSWYHDYGHLELIQLQLATQFENWYKKYQKPIIQSEYGAETIAGFHQDPPLMFTEEYQKSLLEQYHLGLDQKRRKYVVGELIWNFADFMTEQSPTRVLGNKKGIFTRQRQPKSAAFLLRERYWKIANETRYPHSVAKSQCLENSLFT

SEQ ID NO: 49 - DNA, 6488 bp, Homo sapiens
ggggccgaacgtggtataaaaggggcgggaggccaggctcgtgccgttttgcagacgccaccgccgaggaaaaccgtgtactattagccatggtcaaccccaccgtgttcttcgacattgccgtcgacggcgagcccttgggccgcgtctcctttgaggtcgggcgggcggcggcgtgcgggaatggggcccagaaagtgggccggggtcggggtgggtggtagcgccccaaaggcccgggcgcggggcgaccctgcttgaggggcgagcgcgggcgggctgcggcgccatttcctgacgaggggccattttgggaggtccgcgagtcgcggggaggaggccgggacggcggcggacaaaggcaggcggggcggctgcgaggccgttgggggagggggcccgcgtccgcccgcccgcctcatgtggccgcgccctgtcctgtccgacgcacgtgctcggcggccgcgctcaggtccgcgccttgagagtcgttgggctccgccctagcttggcctgggcgccgcagaccggagccagaagcacgctcgcgggggcttgcgaccgccttcctgggaagctgtcccctggcaggcatgggtgctttacatcctgagctgggaagctgtttgcttgagggtttttctcaaggatcgaggcgcggtgtgagcccgtccatgctcggtcctgtagatcccgggaggccatgttataaaaggagacttgctgggatgtgacgggttgccacttgaaatatcttccatttggataaagtaggaatatttatacatgtgccccaaacgtccctccgtgtcccccacccccaagcggaaatgtgaaaatgggccttgcctttgctggtgcccaaggaccgccttccactgcagtgacggcgctggcgggggaggcgctcttgagcccctcccgattgtccctctgcctagcaagcaagttgcgactggccacaaggcaggcctcttccgaccaaggtggattaccagtgattacctaattagttttgagagcgttaaatgagttcttaaagatcagttgtaattatagcatagtatctaaacttggcgcgtgtcttcaaagttaaatattgagtacgattccgttccagttaacatggatagaccttagggagtagcgaaataggatgttagtggttttattcctttaaatcacatctcaaaaggccaccaatggctagtttgggatcttattccgaaaatagattgatcctcatgcagtcttcgtgaggacagagcgatttccttgttgcctaccctgtccatagtgcctggcacataggcactgaaacactgcatgttaatccacaccccaccccacctatgagtgtagtcaaagctggtaagtgacaagggctttcgtggaaacttggcctgacctaatgttgggcatcaggttacccaaagagcttcagggaaatgagaaaggacttgcaggtcttgatgagaatggaggggtaactgccaatgagggctttggctttagcgaaagtctgaaagggaagccataggaacttaaacgtaccgactataaagctctgagaaaagctgatgttttagaaagaccatacattctaggtacaaatacctaaaaactaaaaaataagtacgttggccaggcgggcggatcacgaagtcaggagattgagaccgtcctggccaacatggtgaaaccccacctctattaaaaatacaaaaattagctgggcgtggtggcgcttgcctgtaatctcagctactctagaggctgaggcaggagaatcgcttgaaccccggaggcggaggctgcagtgagccgagatcgtgccactgcactccagcctggtgacagtgagactcttgtctcaaaaaaaaaaaagtacattgctataagagaagtgcacacggatactagtagttaattcagtcacatctgtgaaatagcttataaaatgctacttttaaacaagctgtttttatgaaagggcttgtaaatgtttatggtatttaagctacctctctagccataacgtattatacattcaagaaaggttcaaaaccagatatactagaaaccaatctttattttttaccccactactaggtaaggggcctggataccaagaagtgactgctcatctaatccataaagctatgttaacagattggaggtagtagcattttcattacaagtgactaaaagaacagctgtttacccctgatcgtgcagcagtgcttgctgttccttagaattttgccttgtaagttctagctcaagttggggggtggtgatagacatttaagaagccatatatcttttcagaagtaggtgtgatgtactaaaagtttgagacactttctagaagtctcactatttaagttatgactagtattggatttttggcatgtctttgggtttcatgtttcttaacccaactgcctgcagggccttatggctgtcaggagcagttcttgggaattaaagtaattactgaagaagtattctagtgagaaaatgaatttatgactcagaagcccctaaagacatgggtactaagcaacaaaataagcagatgttaattaactgtaattttctcttacagctgtttgcagacaaggtcccaaagacagcaggttggtccattttctaagtttaacaaagatgttccaattgtgacagtttgtgtgtgtgtgtgtatatatatatttttatgtatgtatatatgtgtttaatttttttttaaacagaaaattttcgtgctctgagcactggagagaaaggatttggttataagggttcctgctttcacagaattattccagggtttatgtgtcaggtacgaaatttactgaattttattttatttgggttgctcccttcatttgggattgagccagaatatttcaggatacacatatctgaactgttactctaccatttcggttctatttaacccttctattcagtttgaacttgggtttaaagtttgaaccttgcagatttggcacacttcatggttatgttgtcagaagtgacatttttcctatatgttgacagggtggtgacttcacacgccataatggcactggtggcaagtccatctatggggagaaatttgaagatgagaacttcatcctaaagcatacgggtcctggcatcttgtccatggcaaatgctggacccaacacaaatggttcccagtttttcatctgcactgccaagactgagtggtaagggtacaacatggcacactaaccacctgactaaatgaaaagttgccctggggggaacggaacaaacactacttttcttcaacctttgcttccacagactttttcatccctaagatactagaagaagagcatacataaacgacaaatatagccaatgtgatacagaatgtcagatactatgatagaaacttggcccttagctgggtggttgaattaggtgctacttttttgagatggagttttgctctgttgccaggttggagtgcagtggcacaatctgggctcactgcaacctctgcctcctgggttcaagcgattctcctgccttggcctcctgagtagctgagaatacagatgtgtgccagcatgcctggctaattttttgtatttttgtggagacggggtttcatcatgttggccaagctggtcttgaactcgtgacttaaggtgaaccacctgccttggccccccaaagtgctgggatttcaggcatgagccactgcgcccaaccaattaagtgctttttttttttttttcttttctcagactggatctcgctcttatctcccaggttggagtgcagtggtgccatctcagctcactgcaacctcctcccgggttcaagcaattcttctgcctcagcctctcaagtagctggaactacaggcatgcaccaccactcccagctaaattgtgtattattagtagagcgggatttaccatgttgtccaggctggtctcgaactcctgggctcaagtgatctgcctgccttgacccccccaaagtgctgggattacaggcatgagccactgtgcccacccaattaagtgctgcttttatgttactattaataacatgcggttggttgggttttttgtttctttggggtttttgttttgttttgtttgtttttgggggaggggggcgcaattcattctatatgtgtaactcttttttgagatggagtttcgctctgtcgcccaggctggagtgcagtggcgcgatctcggctcactgcaagctccgcctcccaggttcacgccattctcctgcctcagcctcccgagtagctgggactataggcacacgccaccatgcccggctaattttttgtatttttagtagagacagggtttcaccgtgttagccaggatggtctcgatctcctgacctcgtgatccgcccgccttggcctcccaaagtgctgggattacaggcgtgagccaccgcacccggcctatatgtgtaactctttaatggtaattggagaatcatgtttaatgacatttagtacaaaaggcttcagttaaaaaaaaaaaaaaaagctacctttctcgtcttggttcatgacacatggaggctgcttgtttgtggttgccagtcatagtgattgttcttccttttcaaggttggatggcaagcatgtggtgtttggcaaagtgaaagaaggcatgaatattgtggaggccatggagcgctttgggtccaggaatggcaagaccagcaagaagatcaccattgctgactgtggacaactcgaataagtttgacttgtgttttatcttaaccaccagatcattccttctgtagctcaggagagcacccctccaccccatttgctcgcagtatcctagaatctttgtgctctcgctgcagttccctttgggttccatgttttccttgttccctcccatgcctagctggattgcagagttaagtttatgattatgaaataaaaactaaataacaattgtcctcgtttgagttaagagtgttgatgtaggctttattttaagcagtaatgggttacttctgaaacatcacttgtttgcttaattctacacagtacttagattttttttactttccagtcccaggaagtgtcaatgtttgttgagtggaatattgaaaatgtaggcagcaactgggcatggtggctcactgtctgtaatgtattacctgaggcagaagaccacctgagggtaggagtcaagatcagcctgggcaacatagtgagacgctgtctctacaaaaaataattagcctggcctggtggtgcatgcctagtcctagctgatctggaggctgacgtgggaggattgcttgagcctagagtgagctattatcatgccactgtacagcctgggtgttcacagatcttgtgtctcaaaggtaggcagaggcaggaaaagcaaggagccagaattaagaggttgggtcagtctgcagtgagttcatgcatttagaggtgttcttcaagatgactaatgtcaaaaattgagacatctgttgcggttttttttttttttttttcccctggaatgcagtggcgtgatctcagctcactgcagcctccgcctcctgggttcaagtgattctagtgcctcagcctcctgagtagctgggataatgggcgtgtgccaccatgcccagctaatttttgtatttttagtatagatggggtttcatcattttgaccaggctggtctcaaactcttgacctcagctgatgcgcctgccttggcctcccaaactgctgagattacagatgtgagccaccgcaccctacctcattttctgtaacaaagctaagcttgaacactgttgatgttcttgagggaagcatattgggctttaggctgtaggtcaagtttatacatcttaattatggtggaattcctatgtagagtctaaaaagccaggtacttggtgctacagtcagtctccctgcagagggttaaggcgcagactacctgcagtgaggaggtactgcttgtagcatatagagcctctccctagctttggttatggaggctttgaggttttgcaaacctgaccaatttaagccataagatctggtcaaagggatacccttcccactaaggacttggtttctcaggaaattatatgtacagtgcttgctggcagttagatgtcaggacaatctaagctgagaaaaccccttctctgcccaccttaacagacctctagggttcttaacccagcaatcaagtttgcctatcctagaggtggcggatttgatcatttggtgtgttgggcaatttttgttttactgtctggttccttctgcgtgaattaccaccaccaccacttgtgcatctcagtcttgtgtgttgtctggttacgtattccctgggtgataccattcaatgtcttaatgtacttgtggctcagacctgagtgcaaggtggaaataaacatcaaacatcttttcattatcccta

SEQ ID NO: 50 - RNA, 2445 nt, Homo sapiens
ggggccgaacgugguauaaaaggggcgggaggccaggcucgugccguuuugcagacgccaccgccgaggaaaaccguguacuauuagccauggucaaccccaccguguucuucgacauugccgucgacggcgagcccuugggccgcgucuccuuugagguaaggggccuggauaccaagaagugacugcucaucuaauccauaaagcuauguuaacagauuggagguaguagcauuuucauuacaagugacuaaaagaacagcuguuuaccccugaucgugcagcagugcuugcuguuccuuagaauuuugccuucuguuugcagacaaggucccaaagacagcagaaaauuuucgugcucugagcacuggagagaaaggauuugguuauaaggguuccugcuuucacagaauuauuccaggguuuaugugucaggguggugacuucacacgccauaauggcacugguggcaaguccaucuauggggagaaauuugaagaugagaacuucauccuaaagcauacggguccuggcaucuuguccauggcaaaugcuggacccaacacaaaugguucccaguuuuucaucugcacugccaagacugagugguuggauggcaagcaugugguguuuggcaaagugaaagaaggcaugaauauuguggaggccauggagcgcuuuggguccaggaauggcaagaccagcaagaagaucaccauugcugacuguggacaacucgaauaaguuugacuuguguuuuaucuuaaccaccagaucauuccuucuguagcucaggagagcaccccuccaccccauuugcucgcaguauccuagaaucuuugugcucucgcugcaguucccuuuggguuccauguuuuccuuguucccucccaugccuagcuggauugcagaguuaaguuuaugauuaugaaauaaaaacuaaauaacaauuguccucguuugaguuaagaguguugauguaggcuuuauuuuaagcaguaauggguuacuucugaaacaucacuuguuugcuuaauucuacacaguacuuagauuuuuuuuacuuuccagucccaggaagugucaauguuuguugaguggaauauugaaaauguaggcagcaacugggcaugguggcucacugucuguaauguauuaccugaggcagaagaccaccugaggguaggagucaagaucagccugggcaacauagugagacgcugucucuacaaaaaauaauuagccuggccugguggugcaugccuaguccuagcugaucuggaggcugacgugggaggauugcuugagccuagagugagcuauuaucaugccacuguacagccuggguguucacagaucuugugucucaaagguaggcagaggcaggaaaagcaaggagccagaauuaagagguugggucagucugcagugaguucaugcauuuagagguguucuucaagaugacuaaugucaaaaauugagacaucuguugcgguuuuuuuuuuuuuuuuuuccccuggaaugcaguggcgugaucucagcucacugcagccuccgccuccuggguucaagugauucuagugccucagccuccugaguagcugggauaaugggcgugugccaccaugcccagcuaauuuuuguauuuuuaguauagaugggguuucaucauuuugaccaggcuggucucaaacucuugaccucagcugaugcgccugccuuggccucccaaacugcugagauuacagaugugagccaccgcacccuaccucauuuucuguaacaaagcuaagcuugaacacuguugauguucuugagggaagcauauugggcuuuaggcuguaggucaaguuuauacaucuuaauuaugguggaauuccuauguagagucuaaaaagccagguacuuggugcuacagucagucucccugcagaggguuaaggcgcagacuaccugcagugaggagguacugcuuguagcauauagagccucucccuagcuuugguuauggaggcuuugagguuuugcaaaccugaccaauuuaagccauaagaucuggucaaagggauacccuucccacuaaggacuugguuucucaggaaauuauauguacagugcuugcuggcaguuagaugucaggacaaucuaagcugagaaaaccccuucucugcccaccuuaacagaccucuaggguucuuaacccagcaaucaaguuugccuauccuagagguggcggauuugaucauuugguguguugggcaauuuuuguuuuacugucugguuccuucugcgugaauuaccaccaccaccacuugugcaucucagucuuguguguugucugguuacguauucccugggugauaccauucaaugucuuaauguacuuguggcucagaccugagugcaagguggaaauaaacaucaaacaucuuuucauuaucccua

SEQ ID NO: 51 - protein, 105 aa, Homo sapiens
MCQGGDFTRHNGTGGKSIYGEKFEDENFILKHTGPGILSMANAGPNTNGSQFFICTAKTEWLDGKHVVFGKVKEGMNIVEAMERFGSRNGKTSKKITIADCGQLE
